(19) United States
(12) Patent Application Publication
(10) Pub. No.: US 2022/0267853 A1
(43) Pub. Date: Aug. 25, 2022

(54) LEUKAEMIC STEM CELLS

(71) Applicant: OXFORD UNIVERSITY INNOVATION LIMITED, Oxford (GB)

(72) Inventors: Paresh Vyas, Oxford (GB); Zahra Aboukhalil, Oxford (GB); Bilyana Stoilova, Oxford (GB); Dimitris Karamitros, Oxford (GB)

(21) Appl. No.: 16/768,611

(22) PCT Filed: Nov. 30, 2018
(86) PCT No.: PCT/GB2018/053485

§ 371 Date: May 29, 2020

(30) Foreign Application Priority Data
Dec. 1, 2017 (GB) 1720077.5

(51) Int. Cl. C12Q 1/6886; G16B 20/20

(52) U.S. Cl. CPC C12Q 1/6886; G16B 20/20; C12Q 2600/136; C12Q 2600/118; C12Q 2600/106; C12Q 2600/158

(57) ABSTRACT

The present invention is directed to leukaemic stem cells, in particular methods for detecting leukaemic stem cells, use of said leukaemic stem cells in the diagnosis of myeloid leukaemia, methods of treatment, and associated kits and compositions.

[0001] The present invention relates to myeloid leukaemia, and in particular leukaemic stem cells finding utility in diagnosis or prognosis thereof.

[0002] Human Acute Myeloid Leukaemia (AML) is an aggressive cancer of white blood cells and is the most common adult acute leukaemia. In more detail, AML is a cancer of the myeloid line of blood cells. It is characterized by the rapid growth of an abnormal white blood cell population. Approximately 80% of AML patients are over the age of 60 and the overall survival of this patient group lies at only approximately 5%.

[0003] AML can be classified into several subgroups. By way of example, classification according to the World Health Organization (WHO) criteria is based on examination of bone marrow aspirate or a blood sample via light microscopy. Alternatively, bone marrow or blood may be tested for chromosomal translocations by routine cytogenetic methods or fluorescent in situ hybridisation (FISH), and for specific genetic mutations (such as mutations in the FLT3, NPM1 and CEBPA genes) may be detected by polymerase chain reaction (PCR). Immunophenotyping is another method that may be used to identify the AML subtype, which involves detection of cell surface and cytoplasmic markers using flow cytometry.

[0004] Flow cytometry is a technique for counting and examining microscopic particles such as cells by suspending them in a stream of fluid and capturing the light that emerges from each cell as it passes through a laser beam. Cell surface molecules often referred to as “cluster of differentiation” (CD) molecules may be exploited in flow cytometry to characterise cell populations. For example, in fluorescence-activated cell sorting, a diagnostic antibody (labelled with a fluorophore) is employed, which binds to a surface molecule (e.g. a CD molecule) present on and characteristic of the cell population in question. Thereafter, the fluorophore (attached to the antibody) is activated by a laser beam and the fluorescence signal detected by the flow cytometer. In this manner, fluorescently-labelled antibodies can be used to detect and sort cells displaying a specific CD molecule (or set of CD molecules).

[0005] Current AML therapies typically involve induction chemotherapy followed by post-induction therapy. The goal of induction chemotherapy is to reduce the amount of leukaemic cells to less than 5% of all the nucleated cells in a bone marrow sample. Regrettably, this level of reduction of leukaemic cells is not enough to prevent disease recurrence (i.e. relapse) and almost all patients relapse without post-induction therapy. Post-induction therapy typically involves further cycles of chemotherapy, and in some cases, a hematopoietic stem cell transplant that aims to eliminate minimal residual disease (MRD). MRD is the population of leukaemic cells that is recaltricant to therapy. It is thought that this population of cells contains a sub-population of cells termed a leukaemic stem cell (LSC) population that is largely quiescent and serves to sustain disease.

[0006] Current methods used to detect MRD include real time quantitative PCR (RQ-PCR) or by multi-parameter flow cytometry (MFC). However, RQ-PCR based MRD assessment is not possible in approximately half of patients with AML. In addition, and despite recent technical developments, there is still a lack of a validated MFC methodology demonstrating clinical utility—current sensitivity levels of MFC are at least 1 log below real time that of RQ-PCR assays.

[0007] Typically, AML is preceded by chronic phase (CP) chronic myeloid leukaemia (CML) and/or myelodysplastic syndromes (MDS). AML is considered the fully malignant state with 50% of MDS patients proceeding to the AML stage.

[0008] CP-CML, a clonal myeloproliferative disease, requires the constitutively active tyrosine kinase BCR-ABL. The majority of CP-CML patients achieve a durable complete cytogenetic response with tyrosine kinase inhibitors (TKIs; e.g. imatinib, dasatinib, nilotinib). However, in the first few years after diagnosis, 1-1.5% of CP-CML patients per annum progress to a more aggressive acute leukaemia, blast phase (BP)-CML. The rate of progression of CP-CML to BP-CML falls sharply when a major molecular response to TKI therapy is obtained. Less than 10% of patients present with de novo BP-CML and two-thirds of these BP-CML patients have a myeloid immunophenotype. Response to TKIs in BP-CML is short-lived, and median survival following diagnosis of BP-CML is 6.5-11 months, with many patients developing additional mutations within the BCR-ABL kinase domain, leading to TKI resistance and rapid disease progression. Indeed BP-CML is considered a form of AML.

[0009] There have been limited studies of LSC populations in myeloid BP-CML. BP-CML is a serious unmet clinical need with poor outcomes and 5-year survival rates <20% with the only aggressive, curative option: conventional chemotherapy followed by allogeneic stem cell transplant.

[0010] The present invention solves one or more of the above-mentioned problems.

[0011] The present inventors have found that one or more genes selected from: MME, IFITM1, CMTM6, CD55, SLC35F5, CNTNAP2, PIGO, SHH, AQP11, PCDHB9, RHOA, TMEM231, SAMD8, ABCA13, TAPT1, NFASC, LEPROT, MCOLN2, IL6ST, EMP3, CD83, LPAR6, PIEZO2, DERL1, IL1RAP, LPAR4, SERPINE2, PKN2, VAMP2, TMCO3, VAMP7, PTPRC, TFRC, ILDR1, PDIA3, AIMP1, GPR63, CCR7, ATG9B, SLC9B1, CD99, LRP1, UBR4, ATP6AP2, TEX10, CNGB1, SPN, PILRB, JAM2, PDGFA, CD46, NDUFB1, GYPE, SLC12A8, SLC2A14, RNF19B, SPCS1, SLC35F6, CD36, ITM2B, GLG1, SMIM24, TMEM50A, HSPA5, ITGAX, SLC24A2, SLC2A3, RAB11FIP3, IL18R1, CCDC47, FZD4, SHISA9, SORCS1, CLIC4, MS4A2, MLNR, TIGIT, CNGA1, SIRPB2, PRRG4, VSTM4, TMEM107, NETO2, CSF1R, ADRB2, TLR2, FUT4, MGST1, CSF3R, HLA-B, ITGA10, SLC26A8, SIRPB1, RAET1E, ST3GAL6, LAMP1, and LGALS1 advantageously allow sensitive identification of myeloid precursor cells and related leukaemic stem cells, and can be utilised for diagnosing myeloid leukaemia.

[0012] Genomic DNA sequences for each of the above-referenced genes are available from GenBank and are listed in the sequence listing herein as SEQ ID NOs:1-97 (see table). Expression of these genes may be detected by any means, such as by detecting and preferably quantifying mRNA expressed from said genes (e.g. by way of converting the mRNA into cDNA).

[0013] cDNA sequences corresponding to the genes of the invention are provided in the sequence listing herein and are also obtainable from NCBI GenBank (see the accession numbers disclosed herein). In one embodiment the methods of the invention comprise the detection of said cDNA, which corresponds to mRNA expressed from the genes. The skilled person understands that the cDNA sequences provided herein may be equivalent to the RNA except for the presence of the base “T” rather than “U”.

[0014] The methods of the invention may comprise detecting expression of a nucleic acid sequence having at least 80% (such at least 85%, 90%, 95%, 98%, 99% or 100%) sequence identity to a nucleic acid sequence provided herein, or a fragment or derivative thereof. Preferably a nucleic acid sequence having 100% sequence identity to a nucleic acid sequence provided herein.

[0015] The methods of the invention may comprise detecting an amino acid sequence translated from a gene of the invention, such as an amino acid sequence translated from a nucleic acid sequence having at least 80% (such at least 85%, 90%, 95%, 98%, 99% or 100%) sequence identity to a nucleic acid sequence provided herein, or a fragment or derivative thereof. Preferably a nucleic acid sequence having 100% sequence identity to a nucleic acid sequence provided herein.

[0016] The methods of the invention may comprise detecting expression of an amino acid having at least 80% (such at least 85%, 90%, 95%, 98%, 99% or 100%) sequence identity to an amino acid sequence provided herein, or a fragment or derivative thereof. Preferably an amino acid sequence having 100% sequence identity to an amino acid sequence provided herein.

[0017] Thus the invention provides in one aspect a gene expression profile comprising (or consisting of) one or more of MME, IFITM1, CMTM6, CD55, SLC35F5, CNTNAP2, PIGO, SHH, AQP11, PCDHB9, RHOA, TMEM231, SAMD8, ABCA13, TAPT1, NFASC, LEPROT, MCOLN2, IL6ST, EMP3, CD83, LPAR6, PIEZO2, DERL1, IL1RAP, LPAR4, SERPINE2, PKN2, VAMP2, TMCO3, VAMP7, PTPRC, TFRC, ILDR1, PDIA3, AIMP1, GPR63, CCR7, ATG9B, SLC9B1, CD99, LRP1, UBR4, ATP6AP2, TEX10, CNGB1, SPN, PILRB, JAM2, PDGFA, CD46, NDUFB1, GYPE, SLC12A8, SLC2A14, RNF19B, SPCS1, SLC35F6, CD36, ITM2B, GLG1, SMIM24, TMEM50A, HSPA5, ITGAX, SLC24A2, SLC2A3, RAB11FIP3, IL18R1, CCDC47, FZD4, SHISA9, SORCS1, and CLIC4. Advantageously, changes in expression of said genes correlates with the presence or absence of myeloid leukaemia and/or leukaemic stem cells. The invention provides use of said gene expression profile for identifying the presence or absence of LSCs or the presence of myeloid leukaemia (e.g. AML).

[0018] Thus the invention provides in one aspect a gene expression profile comprising (or consisting of) one or more of MS4A2, MLNR, TIGIT, CNGA1, MME, SIRPB2, PRRG4, VSTM4, TMEM107, NETO2, CSF1R, ADRB2, TLR2, FUT4, MGST1, CSF3R, HLA-B, ITGA10, SLC26A8, SIRPB1, RAET1E, ST3GAL6, LAMP1, LGALS1, and ILDR1. Advantageously, changes in expression of said genes facilitates identification of myeloid precursor cells (e.g. non-LSC myeloid precursor cells).

[0019] In some embodiments the method of the invention comprise detecting expression of combinations of the genes described herein to detect the type of myeloid precursor cell as well as whether or not said cell is an LSC.

[0020] The term “one or more” when used in the context of a gene described herein may mean at least 2, 3, 4, 5, 6, 7, 8, 9, 10, 11, 12, 13, 14, 15, 16, 17, 18, 19, 20, 21, 22, 23 or 24 of the genes. Suitably, the term “one of more” in this context may mean all of the genes.

[0021] In one aspect the invention provides a method for identifying an LSC in a sample, said method comprising:
[0022] a. detecting expression of one or more genes selected from: MME, IFITM1, CMTM6, CD55, SLC35F5, CNTNAP2, PIGO, SHH, AQP11, PCDHB9, RHOA, TMEM231, SAMD8, ABCA13, TAPT1, NFASC, LEPROT, MCOLN2, IL6ST, EMP3, CD83, LPAR6, PIEZO2, DERL1, IL1RAP, LPAR4, SERPINE2, PKN2, VAMP2, TMCO3, VAMP7, PTPRC, TFRC, ILDR1, PDIA3, AIMP1, GPR63, CCR7, ATG9B, SLC9B1, CD99, LRP1, UBR4, ATP6AP2, TEX10, CNGB1, SPN, PILRB, JAM2, PDGFA, CD46, NDUFB1, GYPE, SLC12A8, SLC2A14, RNF19B, SPCS1, SLC35F6, CD36, ITM2B, GLG1, SMIM24, TMEM50A, HSPA5, ITGAX, SLC24A2, SLC2A3, RAB11FIP3, IL18R1, CCDC47, FZD4, SHISA9, SORCS1, and CLIC4 in the sample:
[0023] b. comparing the detected expression of said one or more genes to expression of said one or more genes in a reference standard; and
[0024] c. identifying an LSC in said sample based on said comparison.

[0025] In one aspect the invention provides a method for identifying a leukaemic stem cell (LSC) or a myeloid precursor cell in a sample, said method comprising:

a. detecting expression of one or more genes selected from: MME, IFITM1, CMTM6, CD55, SLC35F5, CNTNAP2, PIGO, SHH, AQP11, PCDHB9, RHOA, TMEM231, SAMD8, ABCA13, TAPT1, NFASC, LEPROT, MCOLN2, IL6ST, EMP3, CD83, LPAR6, PIEZO2, DERL1, IL1RAP, LPAR4, SERPINE2, PKN2, VAMP2, TMCO3, VAMP7, PTPRC, TFRC, ILDR1, PDIA3, AIMP1, GPR63, CCR7, ATG9B, SLC9B1, CD99, LRP1, UBR4, ATP6AP2, TEX10, CNGB1, SPN, PILRB, JAM2, PDGFA, CD46, NDUFB1, GYPE, SLC12A8, SLC2A14, RNF19B, SPCS1, SLC35F6, CD36, ITM2B, GLG1, SMIM24, TMEM50A, HSPA5, ITGAX, SLC24A2, SLC2A3, RAB11FIP3, IL18R1, CCDC47, FZD4, SHISA9, SORCS1, CLIC4, MS4A2, MLNR, TIGIT, CNGA1, SIRPB2, PRRG4, VSTM4, TMEM107, NETO2, CSF1R, ADRB2, TLR2, FUT4, MGST1, CSF3R, HLA-B, ITGA10, SLC26A8, SIRPB1, RAET1E, ST3GAL6, LAMP1, and LGALS1 in the sample; and
b. identifying the presence of an LSC or myeloid precursor (respectively) in said sample based when expression of the gene is detected; or identifying the absence of an LSC or myeloid precursor (respectively) in said sample based when expression of the gene is not detected).

[0026] In one aspect the invention provides a method for identifying a myeloid precursor cell in a sample, said method comprising:
[0027] a. detecting expression of one or more genes selected from: MME, IFITM1, CMTM6, CD55, SLC35F5, CNTNAP2, PIGO, SHH, AQP11, PCDHB9, RHOA, TMEM231, SAMD8, ABCA13, TAPT1, NFASC, LEPROT, MCOLN2, IL6ST, EMP3, CD83, LPAR6, PIEZO2, DERL1, IL1RAP, LPAR4, SERPINE2, PKN2, VAMP2, TMCO3, VAMP7, PTPRC, TFRC, ILDR1, PDIA3, AIMP1, GPR63, CCR7, ATG9B, SLC9B1, CD99, LRP1, UBR4, ATP6AP2, TEX10, CNGB1, SPN, PILRB, JAM2, PDGFA, CD46, NDUFB1, GYPE, SLC12A8, SLC2A14, RNF19B, SPCS1, SLC35F6, CD36, ITM2B, GLG1, SMIM24, TMEM50A, HSPA5, ITGAX, SLC24A2, SLC2A3, RAB11FIP3, IL18R1, CCDC47, FZD4, SHISA9, SORCS1, and CLIC4 in the sample;
[0028] b. comparing the detected expression of said one or more genes to expression of said one or more genes in a reference standard; and
[0029] c. identifying a myeloid precursor cell in said sample based on said comparison.

[0030] Preferably the myeloid precursor is an LSC.

[0031] Alternatively or additionally, in one aspect the invention provides a method for identifying a myeloid precursor cell in a sample, said method comprising:
[0032] a. detecting expression of one or more genes selected from: MS4A2, MLNR, TIGIT, CNGA1, MME, SIRPB2, PRRG4, VSTM4, TMEM107, NETO2, CSF1R, ADRB2, TLR2, FUT4, MGST1, CSF3R, HLA-B, ITGA10, SLC26A8, SIRPB1, RAET1E, ST3GAL6, LAMP1, LGALS1, and ILDR1 in the sample;
[0033] b. comparing the detected expression of said one or more genes to expression of said one or more genes in a reference standard; and
[0034] c. identifying a myeloid precursor cell in said sample based on said comparison.

[0035] In a related aspect there is provided a method for diagnosing myeloid leukaemia comprising detecting the presence or absence of a leukaemic stem cell (LSC) in a sample, said method comprising:
[0036] a. detecting expression of one or more genes selected from: MME, IFITM1, CMTM6, CD55, SLC35F5, CNTNAP2, PIGO, SHH, AQP11, PCDHB9, RHOA, TMEM231, SAMD8, ABCA13, TAPT1, NFASC, LEPROT, MCOLN2, IL6ST, EMP3, CD83, LPAR6, PIEZO2, DERL1, IL1RAP, LPAR4, SERPINE2, PKN2, VAMP2, TMCO3, VAMP7, PTPRC, TFRC, ILDR1, PDIA3, AIMP1, GPR63, CCR7, ATG9B, SLC9B1, CD99, LRP1, UBR4, ATP6AP2, TEX10, CNGB1, SPN, PILRB, JAM2, PDGFA, CD46, NDUFB1, GYPE, SLC12A8, SLC2A14, RNF19B, SPCS1, SLC35F6, CD36, ITM2B, GLG1, SMIM24, TMEM50A, HSPA5, ITGAX, SLC24A2, SLC2A3, RAB11FIP3, IL18R1, CCDC47, FZD4, SHISA9, SORCS1, and CLIC4 in the sample;
[0037] b. comparing the detected expression of said one or more genes to expression of said one or more genes in a reference standard; and
[0038] c. identifying the presence or absence of an LSC in said sample based on said comparison;
[0039] wherein myeloid leukaemia is diagnosed when said LSC is present in the sample; and
[0040] wherein myeloid leukaemia is not diagnosed when said LSC is absent from the sample.

[0041] In a related aspect there is provided a method for diagnosing myeloid leukaemia comprising detecting the presence or absence of a leukaemic stem cell (LSC) in a sample, said method comprising:
[0042] a. detecting expression of one or more genes selected from: MS4A2, MLNR, TIGIT, CNGA1, MME, SIRPB2, PRRG4, VSTM4, TMEM107, NETO2, CSF1R, ADRB2, TLR2, FUT4, MGST1, CSF3R, HLA-B, ITGA10, SLC26A8, SIRPB1, RAET1E, ST3GAL6, LAMP1, LGALS1, and ILDR1 in the sample;
[0043] b. comparing the detected expression of said one or more genes to expression of said one or more genes in a reference standard; and
[0044] c. identifying the presence or absence of an LSC in said sample based on said comparison;
[0045] wherein myeloid leukaemia is diagnosed when said LSC is present in the sample; and
[0046] wherein myeloid leukaemia is not diagnosed when said LSC is absent from the sample.

[0047] In one embodiment a method of the invention comprises detecting expression of MS4A2.

[0048] In one embodiment a method of the invention comprises detecting expression of one or more of MLNR, TIGIT, and CNGA1.

[0049] In one embodiment a method of the invention comprises detecting expression of MME.

[0050] In one embodiment a method of the invention comprises detecting expression of one or more of SIRPB2, PRRG4, VSTM4, TMEM107, NETO2, CSF1R, ADRB2, TLR2, FUT4, MGST1, CSF3R, HLA-B, ITGA10, SLC26A8, SIRPB1, RAET1E, ST3GAL6, LAMP1, LGALS1, and ILDR1.

[0051] The detected gene expression in the reference standard may have been obtained (e.g. quantified) previously to a method of the invention. The expression level of the genes described herein is suitably known in said reference standard. A reference standard is preferably from the same source as the sample referred to in a method of the invention. For example, both the sample and reference standard may be from bone marrow, or both may be from blood.

[0052] In one embodiment increased expression (upregulation) of MS4A2 in a sample when compared to the expression in a non-CMP reference standard identifies the presence of a CMP cell in said sample. Analogously no difference in expression of MS4A2 in a sample when compared to the expression in a CMP myeloid precursor cell reference standard identifies the presence of a CMP cell in said sample (the skilled person will also appreciate that detection of decreased expression levels may indicate that the sample does not contain a CMP cell).

[0053] A “non-CMP reference standard” may comprise haematopoietic stem cells and/or myeloid precursors cells, such as MPP, LMPP, GMP, MEP and/or MLP cells.

[0054] In one embodiment increased expression (upregulation) of one or more of MLNR, TIGIT and/or CNGA1 (preferably MLNR, TIGIT and CNGA) in a sample when compared to the expression in a non-MPP reference standard identifies the presence of a MPP cell in said sample. Analogously no difference in expression of one or more of MLNR, TIGIT and/or CNGA1 (preferably MLNR, TIGIT and CNGA) in a sample when compared to the expression in a MPP myeloid precursor cell reference standard identifies the presence of a MPP cell in said sample (the skilled person will also appreciate that detection of decreased expression levels may indicate that the sample does not contain a MPP cell).

[0055] A “non-MMP reference standard” may comprise haematopoietic stem cells and/or myeloid precursors cells, such as CMP, LMPP, GMP, MEP and/or MLP cells.

[0056] In one embodiment increased expression (upregulation) of MME in a sample when compared to the expression in a non-LMPP reference standard identifies the presence of a LMPP cell in said sample. Analogously no difference in expression of MME in a sample when compared to the expression in a LMPP myeloid precursor cell reference standard identifies the presence of a LMPP cell in said sample (the skilled person will also appreciate that detection of decreased expression levels may indicate that the sample does not contain a LMPP cell).

[0057] A “non-LMMP reference standard” does not comprise a MLP cell, but may comprise haematopoietic stem cells and/or myeloid precursor cells, such as CMP, MPP, GMP, and/or MEP cells.

[0058] In one embodiment increased expression (upregulation) of one or more of SIRPB2, PRRG4, VSTM4, TMEM107, NETO2, CSF1R, ADRB2, TLR2, FUT4, MGST1, CSF3R, HLA-B, ITGA10, SLC26A8, SIRPB1, RAET1E, ST3GAL6, LAMP1, LGALS1, and/or ILDR1 (preferably SIRPB2, PRRG4, VSTM4, TMEM107, NETO2, CSF1R, ADRB2, TLR2, FUT4, MGST1, CSF3R, HLA-B, ITGA10, SLC26A8, SIRPB1, RAET1E, ST3GAL6, LAMP1, LGALS1, and ILDR1) in a sample when compared to the expression in a non-GMP reference standard identifies the presence of a GMP cell in said sample. Analogously no expression of one or more of SIRPB2, PRRG4, VSTM4, TMEM107, NETO2, CSF1R, ADRB2, TLR2, FUT4, MGST1, CSF3R, HLA-B, ITGA10, SLC26A8, SIRPB1, RAET1E, ST3GAL6, LAMP1, LGALS1, and/or ILDR1 (preferably SIRPB2, PRRG4, VSTM4, TMEM107, NETO2, CSF1R, ADRB2, TLR2, FUT4, MGST1, CSF3R, HLA-B, ITGA10, SLC26A8, SIRPB1, RAET1E, ST3GAL6, LAMP1, LGALS1, and ILDR1) in a sample when compared to the expression in a GMP myeloid precursor cell reference standard identifies the presence of a GMP cell in said sample (the skilled person will also appreciate that detection of decreased expression levels may indicate that the sample does not contain a GMP cell).

[0059] A “non-GMP reference standard” may comprise haematopoietic stem cells and/or myeloid precursors cells, such as CMP, MPP, LMPP, MEP and/or MLP cells.

[0060] A “CMP reference standard”, “MPP reference standard”, “LMPP reference standard” and “GMP reference standard” preferably only includes CMP, MPP, LMPP, and GMP cells respectively, and in one embodiment does not contain LSCs or is a non-myeloid leukaemia reference standard.

[0061] The terms “myeloid precursor cell” and “myeloid progenitor cell” are used synonymously herein.

[0062] The term “no expression” used herein encompasses “substantially no expression”.

[0063] In one embodiment methods of the invention comprise detecting expression of one or more genes selected from: MME, IFITM1, CMTM6, CD55, SLC35F5, CNTNAP2, PIGO, SHH, AQP11, PCDHB9, RHOA, TMEM231, SAMD8, ABCA13, TAPT1, NFASC, LEPROT, MCOLN2, IL6ST, EMP3, CD83, LPAR6, PIEZO2, DERL1, IL1RAP, LPAR4, SERPINE2, PKN2, VAMP2, TMCO3, VAMP7, PTPRC, TFRC, ILDR1, PDIA3, AIMP1, GPR63, CCR7, ATG9B, SLC9B1, CD99, LRP1, UBR4, ATP6AP2, TEX10, CNGB1, SPN, PILRB, JAM2, PDGFA, CD46, NDUFB1, GYPE, SLC12A8, SLC2A14, RNF19B, SPCS1, SLC35F6, CD36, ITM2B, GLG1, SMIM24, TMEM50A, HSPA5, ITGAX, SLC24A2, SLC2A3, RAB11FIP3, IL18R1, CCDC47, FZD4, SHISA9, SORCS1, and CLIC4.

[0064] The detected expression of these genes may be compared to a LMPP reference standard or a GMP reference standard, wherein the LMPP and GMP cells (respectively) are non-LSCs and/or where the reference standard is a non-myeloid leukaemia (e.g. non-AML) reference standard.

[0065] In one embodiment, when compared to such a reference standard increased expression (upregulation) of one or more of IFITM1, CMTM6, CD55, SLC35F5, AQP11, PCDHB9, RHOA, SAMD8, TAPT1, LEPROT, IL6ST, EMP3, CD83, LPAR6, PIEZO2, IL1RAP, LPAR4, PKN2, TMCO3, VAMP7, PTPRC, TFRC, PDIA3, SLC9B1, CD99, TEX10, CNGB1, PDGFA, SLC12A8, SLC2A14, RNF19B, CD36, HSPA5, ITGAX, SLC2A3, IL18R1, CCDC47, SORCS1, CLIC4, DERL1, VAMP2, AIMP1, UBR4, ATP6AP2, CD46, SPCS1, ITM2B, TMEM50A, FZD4, and/or SHISA9 identifies the presence of an LSC or the presence of myeloid leukaemia (e.g. AML).

[0066] In one embodiment when compared to such a reference standard increased expression (upregulation) of one or more of IFITM1, CMTM6, CD55, SLC35F5, AQP11, PCDHB9, RHOA, SAMD8, TAPT1, LEPROT, IL6ST, EMP3, CD83, LPAR6, PIEZO2, IL1RAP, LPAR4, PKN2, TMCO3, VAMP7, PTPRC, TFRC, PDIA3, SLC9B1, CD99, TEX10, CNGB1, PDGFA, SLC12A8, SLC2A14, RNF19B, CD36, HSPA5, ITGAX, SLC2A3, IL18R1, CCDC47, SORCS1, and/or CLIC4 identifies the presence of an LSC or the presence of myeloid leukaemia (e.g. AML).

[0067] Preferably when compared to such a reference standard increased expression (upregulation) of one or more of IFITM1, AQP11, IL6ST, CD83, LPAR6, and/or LPAR4 identifies the presence of an LSC or the presence of myeloid leukaemia (e.g. AML). More preferably, when compared to such a reference standard increased expression (upregulation) of one or more of AQP11, IFITM1, and/or LPAR6 identifies the presence of an LSC or the presence of myeloid leukaemia (e.g. AML).

[0068] Preferably the LSC is a LMPP LSC or GMP LSC.

[0069] The skilled person will appreciate that in some embodiments no change in expression of said genes when compared to a LMPP reference standard or a GMP reference standard or decreased expression (deregulation) of said genes may indicate the absence of an LSC or the absence of myeloid leukaemia (e.g. AML). Likewise, the skilled person will appreciate that when the reference standard is a LMPP LSC or GMP LSC reference standard, no change in expression (or increased expression) may indicate the presence of an LSC or the presence of myeloid leukaemia (e.g. AML), while a decrease in expression may indicate the absence of an LSC or the absence of myeloid leukaemia (e.g. AML).

[0070] In one embodiment, when compared to such a reference standard decreased expression (downregulation) of one or more of MME, CNTNAP2, PIGO, SHH, TMEM231, ABCA13, NFASC, MCOLN2, SERPINE2, ILDR1, GPR63, CCR7, ATG9B, LRP1, SPN, PILRB, JAM2, NDUFB1, GYPE, SLC35F6, GLG1, SMIM24, SLC24A2, and/or RAB11FIP3 identifies the presence of an LSC or the presence of myeloid leukaemia (e.g. AML).

[0071] Preferably when compared to such a reference standard decreased expression (downregulation) of one or more of MME, PIGO, SHH, ABCA13, SERPINE2, CCR7, ATG9B, and/or GYPE identifies the presence of an LSC or the presence of myeloid leukaemia (e.g. AML). More preferably when compared to such a reference standard decreased expression (downregulation) of one or more of MME, and/or SHH identifies the presence of an LSC or the presence of myeloid leukaemia (e.g. AML).

[0072] The present methods may include the use of genes that are upregulated and those that are downregulated in identifying an LSC or other cell of the invention.

[0073] The skilled person will appreciate that in some embodiments no change in expression of said genes when compared to a LMPP reference standard or a GMP reference standard or increased expression (upregulation) of said genes may indicate the absence of an LSC or the absence of myeloid leukaemia (e.g. AML). Likewise, the skilled person will appreciate that when the reference standard is a LMPP LSC or GMP LSC reference standard, no change in expression (or a decrease in expression) may indicate the presence of an LSC or the presence of myeloid leukaemia (e.g. AML), while an increase in expression may indicate the absence of an LSC or the absence of myeloid leukaemia (e.g. AML).

[0074] Further distinctions in gene expression levels between LMPPs and GMPs from myeloid leukaemia reference standards (and optionally the counterparts from non-myeloid leukaemia reference standards) can be made by reference to the expression data of FIG. 11.

[0075] Further distinctions in gene expression levels between LMPP LSCs and GMP LSCs (and optionally their non-LSC counterparts) can be made by reference to the expression data of FIG. 11.

[0076] The invention also provides a kit comprising means for detecting expression of one or more genes of the invention. In one embodiment, the means for detecting gene expression is a probe for use in quantitative RT-PCT (such as a Taqman probe). Primers or antibodies may also be used to measure gene expression levels. As discussed above, methods for assessing gene expression levels are conventional techniques known to those skilled in the art and a skilled person would readily be able to design and/or select suitable detection agents for use in inter alia the kits of the present invention. In one embodiment, the kit may further comprise instructions explaining how to use the means for detecting expression of one or more genes in a method of the invention.

[0077] The terms “detecting expression” and “detected expression” encompass detecting both negative (e.g. no expression) and positive expression (e.g. expression). In one embodiment the expression is positive expression.

[0078] Detection may be carried out by any means known to the person skilled in the art. For example, detection may be at the level of transcription or translation. For instance, mRNA of a target gene can be detected and quantified by e.g. Northern blotting or by quantitative reverse transcription PCR (RT-PCR). Single cell gene expression analysis may also be performed using commercially available systems (e.g. Fluidigm Dynamic Array). Alternatively, or in addition, gene expression levels can be determined by analysing protein levels e.g. by using Western blotting techniques such as ELISA-based assays. Thus, in one embodiment, gene expression levels are determined by measuring the mRNA/cDNA levels of the genes belonging to the gene expression profile of the present invention. In another embodiment, gene expression levels are determined by measuring the protein levels produced by the genes belonging to the gene expression profile of the present invention. Methods suitable for establishing a baseline or reference value for comparing gene expression levels are conventional techniques known to those skilled in the art.

[0079] Increased expression (upregulation) refers to a detected gene expression level of greater than 0 fold relative to a reference standard, e.g. greater than 1-fold. In one embodiment increased expression means greater than 1.25-fold to about 10-fold or more gene expression relative to a reference standard. In some embodiments, increased expression means greater than at least about 1.1-fold, 1.2-fold, 1.25-fold, 1.5-fold, 1.75-fold, 2-fold, 4-fold, 5-fold, 10-fold, 15-fold, 20-fold, 25-fold, 30-fold, 35-fold, 40-fold, 50-fold, 75-fold, 100-fold, 150-fold, 200-fold, or at least about 300-fold gene expression when compared to a reference standard.

[0080] Decreased expression (downregulation) refers to a detected gene expression level of less than 0 fold relative to a reference standard, e.g. less than −1-fold. In one embodiment decreased expression means less than −1.25-fold to about −10-fold or more gene expression relative to a reference standard. In some embodiments, decreased expression means less than at least about −1.1-fold, −1.2-fold, −1.25-fold, −1.5-fold, −1.75-fold, −2-fold, −4-fold, −5-fold, −10-fold, −15-fold, −20-fold, 25-fold, −30-fold, −35-fold, −40-fold, −50-fold, −75-fold, −100-fold, −150-fold, −200-fold, or at least about −300-fold gene expression when compared to a reference standard.

[0081] The fold change difference can be in absolute terms (e.g. CPM: counts per million) or Log 2CPM (a standard measure in the field) of the gene expression level in a sample. Preferably the fold change is Log 2 fold change.

[0082] In one embodiment said fold-change is measured/is determined by RNA sequencing (RNA-Seq), e.g. in toto.

[0083] A cell comprising a cell surface polypeptide marker phenotype CD34⁺; CD45RA⁻; CD123⁺; and CD38⁺ is also referred to herein as a “CMP cell”.

[0084] A cell comprising a cell surface polypeptide marker phenotype CD34⁺, CD45RA⁻; CD90⁻; and CD38⁻ is also referred to herein as a “MPP cell”.

[0085] A cell comprising a cell surface polypeptide marker phenotype CD34⁺; CD45RA⁺; CD123⁺; and CD38⁻ is also referred to herein as a “LMPP cell”.

[0086] A cell comprising a cell surface polypeptide marker phenotype CD34⁺; CD45RA⁺; CD123⁺; and CD38⁺ is also referred to herein as a “GMP cell”.

[0087] A cell comprising a cell surface polypeptide marker phenotype CD34⁺; CD45RA⁻; CD123⁻; and CD38⁺ is also referred to herein as a “MEP cell”.

[0088] A cell comprising a cell surface polypeptide marker phenotype CD34⁺; CD45RA⁺; CD90⁻; CD38⁻; and CD10⁺ is also referred to herein as a “MLP cell”.

[0089] A cell surface polypeptide marker phenotype CD34⁺; CD45RA⁻; CD123⁻; CD90⁺; and CD38⁻ is also referred to herein as a “haematopoietic stem cell” (HSC).

[0090] In one embodiment the above-mentioned cells are leukaemic stem cells.

[0091] In one aspect the present invention is directed to leukaemic stem cells (LSCs). Said LSCs preferably express one or more of MME, IFITM1, CMTM6, CD55, SLC35F5, CNTNAP2, PIGO, SHH, AQP11, PCDHB9, RHOA, TMEM231, SAMD8, ABCA13, TAPT1, NFASC, LEPROT, MCOLN2, IL6ST, EMP3, CD83, LPAR6, PIEZO2, DERL1, IL1RAP, LPAR4, SERPINE2, PKN2, VAMP2, TMCO3, VAMP7, PTPRC, TFRC, ILDR1, PDIA3, AIMP1, GPR63, CCR7, ATG9B, SLC9B1, CD99, LRP1, UBR4, ATP6AP2, TEX10, CNGB1, SPN, PILRB, JAM2, PDGFA, CD46, NDUFB1, GYPE, SLC12A8, SLC2A14, RNF19B, SPCS1, SLC35F6, CD36, ITM2B, GLG1, SMIM24, TMEM50A, HSPA5, ITGAX, SLC24A2, SLC2A3, RAB11FIP3, IL18R1, CCDC47, FZD4, SHISA9, SORCS1, and CLIC4. More preferably one or more of IFITM1, CMTM6, CD55, SLC35F5, AQP11, PCDHB9, RHOA, SAMD8, TAPT1, LEPROT, IL6ST, EMP3, CD83, LPAR6, PIEZO2, IL1RAP, LPAR4, PKN2, TMCO3, VAMP7, PTPRC, TFRC, PDIA3, SLC9B1, CD99, TEX10, CNGB1, PDGFA, SLC12A8, SLC2A14, RNF19B, CD36, HSPA5, ITGAX, SLC2A3, IL18R1, CCDC47, SORCS1, CLIC4, DERL1, VAMP2, AIMP1, UBR4, ATP6AP2, CD46, SPCS1, ITM2B, TMEM50A, FZD4, and SHISA9. Said LSCs may express one or more genes selected from: MS4A2, MLNR, TIGIT, CNGA1, MME, SIRPB2, PRRG4, VSTM4, TMEM107, NETO2, CSF1R, ADRB2, TLR2, FUT4, MGST1, CSF3R, HLA-B, ITGA10, SLC26A8, SIRPB1, RAET1E, ST3GAL6, LAMP1, LGALS1, and ILDR1.

[0092] In one aspect the LSCs comprise the cell surface polypeptide marker phenotype: CD34⁺; CD45RA⁻; CD123+; and CD38⁺; wherein (+) indicates the presence and (−) indicates the absence of said cell surface polypeptide markers. In another aspect the present invention is directed to LSCs comprising the cell surface polypeptide marker phenotype CD34⁺, CD45RA⁻; CD90⁻; and CD38⁻. The invention is also related to uses of said LSCs.

[0093] The term “leukaemic stem cell” as used herein refers to a cell that is capable of self-renewal, proliferation, and/or differentiation. A “leukaemic stem cell” may be identifiable by a serial transplantation assay (e.g. in addition to the methods of the invention).

[0094] A serial transplantation assay may comprise:
[0095] administering (e.g. via IV) a cell to a first immuno-deficient murine recipient; determining whether said cell engrafts in the recipient;
[0096] isolating an engrafted cell from the primary recipient;
[0097] administering the cell to a second immuno-deficient murine recipient; and determining whether the cell engrafts in the secondary recipient;
[0098] wherein when the cell engrafts in a secondary recipient the cell is identified as a leukaemic stem cell; and wherein when the cell does not engraft in a secondary recipient the cell is identified as not being a leukaemic stem cell.

[0099] Thus, in one embodiment a LSC engrafts in a secondary recipient when tested in a serial transplantation assay.

[0100] The LSCs referred to herein preferably have one or more of: chromosome 17p loss (e.g. loss of 17p13), isochromosome 17q, a BCR-ABL fusion gene or combinations thereof. In one embodiment the LSCs referred to herein have two or more of 17p loss (e.g. loss of 17p13), isochromosome 17q, and a BCR-ABL fusion gene. Preferably the LSCs have 17p loss (e.g. loss of 17p13), isochromosome 17q, and a BCR-ABL fusion gene.

[0101] The LSCs preferably have one or more of the karyotypic abnormalities detailed in Table 1(b) herein, such as one or more of: t(9:22) (q34; 11), del(16) (q22), del(16) (q22q23), i(17) (q10), i(17) (?q10), 46, idem, del(7)(p11)/46, XY, 46, idem, and del(17)(p1?3). Preferably a LSC has two or more, three or more, four or more, five or more, six or more, seven or more, or all of the above-referenced karyotypic abnormalities.

[0102] A method of the invention may comprise determining whether one of the above-mentioned properties is present in a detected cell. Additionally or alternatively, a method of the invention may further comprise validating that the detected cell is a LSC by way of the serial transplantation assay described above, or by way of a comparable assay known to the skilled person.

[0103] In one aspect the invention provides a method for diagnosing myeloid leukaemia, said method comprising:
[0104] detecting the presence or absence of a leukaemic stem cell (LSC) in a sample; wherein the LSC comprises a cell surface polypeptide marker phenotype: CD34⁺; CD45RA⁻; CD123⁺; and CD38⁺; wherein (+) indicates the presence and (−) indicates the absence of said cell surface polypeptide markers.

[0105] In one aspect the invention provides a method for diagnosing myeloid leukaemia, said method comprising:
[0106] detecting the presence or absence of a leukaemic stem cell (LSC) in a sample; wherein the LSC comprises a cell surface polypeptide marker phenotype: CD34⁺, CD45RA⁻; CD90⁻; and CD38⁻; wherein (+) indicates the presence and (−) indicates the absence of said cell surface polypeptide markers.

[0107] In embodiments when an LSC is present in the sample myeloid leukaemia is diagnosed. In embodiments when an LSC is not present in the sample myeloid leukaemia is not diagnosed.

[0108] The LSCs can also be used to determine prognosis in myeloid leukaemia, thus in one aspect there is provided a method comprising: detecting the presence or absence of a leukaemic stem cell (LSC) in a sample; wherein the LSC comprises a cell surface polypeptide marker phenotype: CD34⁺; CD45RA⁻; CD123⁺; and CD38⁺. In another aspect there is provided a method comprising: detecting the presence or absence of a leukaemic stem cell (LSC) in a sample; wherein the LSC comprises a cell surface polypeptide marker phenotype: CD34⁺, CD45RA⁻; CD90⁻; and CD38⁻. A poor prognosis is determined when said LSC is present in the sample; and a good prognosis is determined when said LSC is absent from the sample.

[0109] The present invention also provides use of a leukaemic stem cell for diagnosing myeloid leukaemia, or for determining prognosis in myeloid leukaemia, in vitro. In one embodiment the leukaemic stem cell comprises a cell surface polypeptide marker phenotype: CD34⁺; CD45RA⁻; CD123⁺; and CD38⁺. In another embodiment the leukaemic stem cell comprises a cell surface polypeptide marker phenotype: CD34⁺, CD45RA⁻; CD90⁻; and CD38⁻.

[0110] The myeloid leukaemia referred to herein may be MDS, MRD, chronic myeloid leukaemia (CML) or acute myeloid leukaemia (AML). Preferably the myeloid leukaemia is AML.

[0111] In one embodiment the leukaemia is chronic myeloid leukaemia (CML). CML can be split up into different disease phases. Chronic phase-CML (CP-CML) is the first disease phase which may be associated with constitutively active tyrosine kinase BCR-ABL. Some subjects progress to accelerated phase CML (AP-CML), and ultimately blast phase CML (BP-CML) characterised by more aggressive leukaemic symptoms, and short-term patient survival.

[0112] CP-CML is largely asymptomatic, and typically when symptoms are present, they are of a mild nature including fatigue, left side pain, joint and/or hip pain, or abdominal fullness.

[0113] AP-CML may be diagnosed when one or more of the following are present:
[0114] i. 10-19% myeloblasts in the blood or bone marrow;
[0115] ii. >20% basophils in the blood or bone marrow;
[0116] iii. Platelet count <100,000, unrelated to therapy;
[0117] iv. Platelet count >1,000,000, unresponsive to therapy;
[0118] v. Cytogenetic evolution with new abnormalities in addition to the Philadelphia chromosome; and/or
[0119] vi. Increasing splenomegaly or white blood cell count, unresponsive to therapy.

[0120] BP-CML may be diagnosed when one or more of the following are present:
[0121] i. >20% myeloblasts or lymphoblasts in the blood or bone marrow;
[0122] ii. Large clusters of blasts in the bone marrow on biopsy; and/or
[0123] iii. Development of a chloroma (solid focus of leukaemia outside the bone marrow).

[0124] In one embodiment the present invention preferably diagnoses BP-CML.

[0125] The LSCs of the invention may be isolated. For example, the LSCs may be separated from other cell types using an appropriate technique such as a flow cytometric techniques, e.g. fluorescence activated cell sorting (FACS). In a related aspect there is provided a composition comprising a LSC of the invention. The composition may be enriched in LSCs, for example said LSCs may constitute at least 70%, 75%, 80%, 85%, 90% or 95% of the total cells comprised in the composition.

[0126] Preferably, the composition comprises detecting means, wherein said detecting means facilitates detection of one or more of the cell surface polypeptide markers.

[0127] A cell surface polypeptide marker may be displayed (at least in part) on the extracellular surface of a cell. Markers of the present invention may include CD34, CD45RA, CD90, CD123, CD38, CD10, CD19, Lin, and CD33. CD34 is a heavily glycosylated, 105-120 kDa transmembrane glycoprotein expressed on hematopoietic progenitor cells, vascular endothelial cells and some fibroblasts. The CD34 cytoplasmic domain is a target for phosphorylation by activated protein kinase C, suggesting a role for CD34 in signal transduction. CD34 may also play a role in adhesion of certain antigens to endothelium. CD45R, also designated CD45 and PTPRC, has been identified as a transmembrane glycoprotein, broadly expressed among hematopoietic cells. Multiple isoforms of CD45R are distributed throughout the immune system according to cell type including CD45RA. CD45R functions as a phosphotyrosine phosphatase, a vital component for efficient tyrosine phosphorylation induction by the TCR/CD3 complex. CD90 is a 25-37 kDa heavily N-glycosylated, glycophosphatidylinositol (GPI) anchored conserved cell surface protein originally discovered as a thymocyte antigen. The CD123 antigen (also known as interleukin-3 receptor) is a molecule found on cells which helps transmit the signal of interleukin-3, a soluble cytokine important in the immune system. CD38, also known as cyclic ADP ribose hydrolase is a glycoprotein found on the surface of many immune cells (white blood cells). CD38 is thought to function in cell adhesion, signal transduction and calcium signalling. CD19 is a 95 kDa type-I transmembrane glycoprotein that belongs to the immunoglobulin superfamily. It is expressed on B cells throughout most stages of B cell differentiation and associates with CD21, CD81, and CD225 (Leu-13) forming a signal transduction complex. CD19 functions as a regulator in B cell development, activation, and differentiation. CD10 is a single pass, type II transmembrane, 100 kDa cell surface glycoprotein belonging to peptidase M13 family. CD33 is a transmembrane receptor expressed on cells of myeloid lineage.

[0128] When used in the context of cell surface polypeptide marker phenotypes herein (+) indicates the presence and (−) indicates the absence of said cell surface polypeptide markers. Any suitable detection means can be employed to determine the presence or absence of said markers. In one embodiment, the presence (+) of a marker refers to an elevation in the levels of marker in a sample above a background level. Likewise, the absence (−) of a marker refers to a reduction in the levels of a marker in a sample below a background level. In one embodiment, the elevation in the levels of marker in a sample above a background level is 1 or more (such as 2, 3, 4, 5, 6, 7, 8, 10, 15, 20, 25) fluorescence units. In one embodiment a reduction in the levels of a marker in a sample below a background level is 1 or more (such as 2, 3, 4, 5, 6, 7, 8, 10, 15, 20, 25) fluorescence units. In this regard, it would be routine for a skilled person in the art to determine the background level of marker expression in a sample.

[0129] Preferably the detection means comprises one or more antibodies that bind to a cell surface polypeptide marker. Thus, in one embodiment, said cell surface polypeptide markers may be detected by specific binding of said one or more antibodies.

[0130] The term “antibody” is used in the broadest sense and specifically covers monoclonal and polyclonal antibodies (and fragments thereof) so long as they exhibit the desired biological activity. In particular, an antibody is a protein including at least one or two, heavy (H) chain variable regions (abbreviated herein as VHC), and at least one or two light (L) chain variable regions (abbreviated herein as VLC). The VHC and VLC regions can be further subdivided into regions of hypervariability, termed “complementarity determining regions” (“CDR”), interspersed with regions that are more conserved, termed “framework regions” (FR). The extent of the framework region and CDRs has been precisely defined (see, Kabat, E. A., et al. Sequences of Proteins of Immunological Interest, Fifth Edition, U.S. Department of Health and Human Services, NIH Publication No. 91-3242, 1991, and Chothia, C. et al, J. Mol. Biol. 196:901-917, 1987). Preferably, each VHC and VLC is composed of three CDRs and four FRs, arranged from amino-terminus to carboxy-terminus in the following order FRI, CDR1, FR2, DR2, FR3, CDR3, FR4. The VHC or VLC chain of the antibody can further include all or part of a heavy or light chain constant region. In one embodiment, the antibody is a tetramer of two heavy immunoglobulin chains and two light immunoglobulin chains, wherein the heavy and light immunoglobulin chains are interconnected by, e.g., disulfide bonds. The heavy chain constant region includes three domains, CH1, CH2 and CH3. The light chain constant region is comprised of one domain, CL. The variable region of the heavy and light chains contains a binding domain that interacts with an antigen. The term “antibody” includes intact immunoglobulins of types IgA, IgG, IgE, IgD, IgM (as well as subtypes thereof), wherein the light chains of the immunoglobulin may be of types kappa or lambda. The term antibody, as used herein, also refers to a portion of an antibody that binds to one of the above-mentioned markers, e.g., a molecule in which one or more immunoglobulin chains is not full length, but which binds to a marker. Examples of binding portions encompassed within the term antibody include (i) a Fab fragment, a monovalent fragment consisting of the VLC, VHC, CL and CH1 domains; (ii) a F(ab′)2 fragment, a bivalent fragment comprising two Fab fragments linked by a disulfide bridge at the hinge region; (iii) a Fc fragment consisting of the VHC and CH1 domains; (iv) a Fv fragment consisting of the VLC and VHC domains of a single arm of an antibody, (v) a dAb fragment (Ward et al, Nature 341:544-546, 1989), which consists of a VHC domain; and (vi) an isolated complementarity determining region (CDR) having sufficient framework to bind, e.g. an antigen binding portion of a variable region. An antigen binding portion of a light chain variable region and an antigen binding portion of a heavy chain variable region, e.g., the two domains of the Fv fragment, VLC and VHC, can be joined, using recombinant methods, by a synthetic linker that enables them to be made as a single protein chain in which the VLC and VHC regions pair to form monovalent molecules (known as single chain Fv (scFv); see e.g., Bird et al. (1988) Science IAI-ATi-Alp; and Huston et al. (1988) Proc. Natl. Acad. ScL USA 85:5879-5883). Such single chain antibodies are also encompassed within the term antibody. These may be obtained using conventional techniques known to those skilled in the art, and the portions are screened for utility in the same manner as are intact antibodies.

[0131] Preferably an antibody as used herein comprises a heavy chain with three CDRs (CDR1, CDR2, and CDR3) and a light chain with three CDRs (CDR1, CDR2, and CDR3). More preferably an antibody as used herein comprises a VLC and VHC.

[0132] The antibodies of the present invention can be obtained using conventional techniques known to persons skilled in the art and their utility confirmed by conventional binding studies. By way of example, a simple binding assay is to incubate the cell expressing an antigen with the antibody. If the antibody is tagged with a fluorophore, the binding of the antibody to the antigen can be detected by FACS analysis.

[0133] Antibodies of the present invention can be raised in various animals including mice, rats, rabbits, goats, sheep, monkeys or horses. Blood isolated from these animals contains polyclonal antibodies—multiple antibodies that bind to the same antigen. Antigens may also be injected into chickens for generation of polyclonal antibodies in egg yolk. To obtain a monoclonal antibody that is specific for a single epitope of an antigen, antibody-secreting lymphocytes are isolated from an animal and immortalized by fusing them with a cancer cell line. The fused cells are called hybridomas, and will continually grow and secrete antibody in culture. Single hybridoma cells are isolated by dilution cloning to generate cell clones that all produce the same antibody; these antibodies are called monoclonal antibodies. Methods for producing monoclonal antibodies are conventional techniques known to those skilled in the art (see e.g. Making and Using Antibodies: A Practical Handbook. GC Howard. CRC Books. 2006. ISBN 0849335280). Polyclonal and monoclonal antibodies are often purified using Protein A/G or antigen-affinity chromatography.

[0134] The detection means may comprise one or more antibodies that bind to CD34, CD45RA, CD123, CD90, and CD38. In one embodiment the detection means comprises antibodies that bind to CD34, CD45RA, and CD38. Preferably the detection means further comprises antibodies that bind to CD123 and/or CD90.

[0135] In one embodiment the presence or absence of lineage cell surface markers as described in Example 1, as well as any of CD45, CD33, CD10, and CD19 may be determined.

[0136] Therefore, the detection means may comprise antibodies that bind to said cell surface markers.

[0137] The detection means is preferably specific for a single marker. Thus, in one embodiment where the detection means is an antibody, said antibody may specifically bind to only one of CD34, CD45RA, CD123, CD90, CD38, CD45, CD33, CD10 or CD19. For example, the antibody may specifically bind to CD34 and may not bind to any of CD45RA, CD123, CD90, CD38, CD45, CD33, CD10 and CD19.

[0138] In one embodiment, the antibodies of the present invention recognise and bind to specific epitopes of the above mentioned cell surface polypeptide markers. For example, an antibody of the present invention may bind to an epitope in the N-terminal/C-terminal/mid-region domains/extracellular domains of CD34, CD45RA, CD123, CD90, CD38, lineage markers, CD45, CD33, CD10 or CD19.

[0139] The sequence of CD34, CD45RA, CD123, CD90, CD38, CD45, CD33, CD10 and CD19 are available from the NCBI website (http://www.ncbi.nlm.nih.gov/projects/genome/assembly/grc/human/index.shtml). These amino acid sequences are provided as in the sequence listing section herein.

[0140] In one embodiment, the detection means (e.g. antibodies) bind to a CD34, CD45RA, CD123, CD90, CD38, CD45, CD33, CD10 or CD19 polypeptide comprising an amino acid sequence having at least 80% (such at least 85%, 90%, 95%, 98%, 99% or 100%) sequence identity to the sequences thereof provided herein, or a fragment thereof. In one embodiment, the detection means (e.g. antibodies) bind to a CD34, CD45RA, CD123, CD90, CD38, CD45, CD33, CD10 or CD19 polypeptide comprising an amino acid sequence encoded by a nucleic acid having at least 80% (such at least 85%, 90%, 95%, 98%, 99% or 100%) sequence identity to the sequences thereof provided herein, or a fragment thereof

[0141] Conventional methods for determining nucleic acid sequence identity are discussed in more detail later in the specification.

[0142] In one embodiment, the antibodies are polyclonal and/or monoclonal antibodies.

[0143] In one embodiment, an antibody that binds to one of the above-mentioned cell surface polypeptide markers is one capable of binding that marker with sufficient affinity such that the antibody is useful as a diagnostic/and or prognostic agent. In one embodiment, the term “binds” is equivalent to “specifically binds”. An antibody that binds/specifically binds to a cell surface polypeptide marker of interest is one that binds to one of the above mentioned markers with an affinity (Kₐ) of at least 10⁴ M.

[0144] Suitable antibodies of the present invention may include one or more antibodies described in WO2015/084166, WO2012/085574, or WO2016/083777 (each of which are incorporated herein in their entirety by reference thereto). Such antibodies may include FITC or PE-Cy7 conjugated anti-CD38, PE or FITC-conjugated anti-CD45RA, PE-Cy7-conjugated or APC conjugated anti-CD123, biotin-conjugated anti-CD90, PE-Cy5 or PERCP-conjugated anti-CD34, which are available from a number of different commercial suppliers including BD Biosciences Europe ebioscience, Beckman Coulter and Pharmingen.

[0145] In a preferred embodiment, the antibody is a labelled antibody, such as a fluorescently labelled antibody. Suitable labelled compounds include conventionally known labelled compounds, such as fluorescent substances such as cyanine dyes Cy3 (registered trademark of Amersham Life Science), fluorescein isothiacyanate (FITC), allophycocyanin (APC), rhodamine, Phycoerythrin (PE), PE-Cy5 (Phycoerythrin-Cy5), PE-Cy7 (Phycoerythrin-Cy7), APC-Alexa Fluor 750, APC-eFluor 780, Pacific Blue, Horizon V450 and quantum dot, biotin-conjugated; light scattering substances such as gold particles; photo-absorptive substances such as ferrite; radioactive substances such as iodine-125; and enzymes such as peroxidase or alkali phosphatase.

[0146] In one embodiment of the invention, different antibodies are labelled respectively with mutually distinguishable labels. Labelling may be conducted by binding a labelled compound directly to each antibody. Preferably, the antibodies are labelled with different fluorescent dyes with different fluorescence wavelengths to enable easy discrimination from one another. For example a first antibody may be labelled in red (for example PE-Cy5), a second antibody in orange (for example PI, APC, R-PE) and a third antibody in green (for example Alexa488, FITC). Suitable labelling strategies are routine and known to a person skilled in the art. By way of example, the Lightening Link™ antibody labeling kit may be used (Innova Biosciences, UK).

[0147] In one embodiment an antibody for use in a method of the invention is one or more (preferably all) of: FITC-CD45RA; PE-CLL-1; PE-TIM-3; PE-CD7; PE-CD11b; PE-CD22; PE-CD56; PerCp-CY5.5-CD123; PeCy7-CD33; APC-CD38; APC-H7-CD44; BV421CD34; and V500c-CD45.

[0148] In one embodiment an antibody may be one or more selected from: FITC-CD45RA; PerCp-CY5.5-CD123; APC-CD38; and BV421CD34. Preferably each of said antibodies may be used in a method of the invention.

[0149] In some embodiments a method of the invention may employ one or more of the antibodies referred to in the Examples (see Example 1).

[0150] Methods suitable for detection of the cell surface polypeptide markers of the present invention using labelled antibodies are conventional techniques known to those skilled in the art. For example, when a fluorescent label is used, an antibody that specifically binds to a marker may be detected by observing the emitted fluorescence colour under a microscope. A fluorescent label can also be detected by irradiating a sample with an exciting light—if the label is present, fluorescence is emitted from the sample. Thus, whether a cell is positive or negative for a particular cell surface marker may be judged by using a labelled antibody specific for said marker and observing the emitted fluorescence colour under a microscope. In a preferred embodiment of the invention, fluorescence-activated cell sorting (FACS) is used for detection of the cell surface polypeptide markers/labelled antibodies of the present invention.

[0151] In a preferred embodiment FACS gating is employed to determine the cell surface marker polypeptide phenotype on a single cell of the invention.

[0152] The cells described herein are all typically lineage negative (Lin⁻). In some embodiments the cells may comprise the presence or absence of CD10 (preferably the absence of CD10). Typically said cells may be negative for CD19 and/or CD33.

[0153] In one aspect the invention provides a method for diagnosing myeloid leukaemia, said method comprising:
[0154] a. detecting the concentration of a cell in a sample, wherein the cell is identified or detected by way of a gene expression profile described herein, or wherein the cell comprises a cell surface polypeptide marker phenotype:
[0155] i. CD34⁺; CD45RA⁻; CD123⁺; and CD38⁺; or
[0156] ii. CD34⁺, CD45RA⁻; CD90⁻; and CD38⁻;
[0157] wherein (+) indicates the presence and (−) indicates the absence of said cell surface polypeptide markers;
[0158] b. comparing the concentration of the detected cell with the concentration of a cell with the same cell surface polypeptide marker phenotype in a diagnostic reference standard; and
[0159] c. identifying the presence or absence of a concentration difference;
[0160] wherein said presence or absence of a concentration difference correlates with the presence or absence of myeloid leukaemia.

[0161] The cell is a blood cell, and in one embodiment is a leukaemic stem cell. In one embodiment the method may further comprise a step of confirming that the cell in said sample is a leukaemic stem cell.

[0162] In one embodiment the detected cell is one or more or two or more selected from: a CMP cell, a MPP cell, a LMPP cell, and a GMP cell. Preferably the detected cell is three or more selected from: a CMP cell, a MPP cell, a LMPP cell, and a GMP cell.

[0163] The methods of the invention encompass comparing the concentration of the detected cell with the concentration of a cell with the same surface polypeptide marker phenotype in a diagnostic reference standard. The cell concentration in the diagnostic reference standard may have been obtained (e.g. quantified) previously to a method of the invention. The presence or absence of a concentration difference when compared to said diagnostic reference standard correlates with myeloid leukaemia.

[0164] The diagnostic reference standard is preferably from the same sample source as the sample referred to in a method of the invention. For example, both the sample and diagnostic reference standard may be from bone marrow, or both samples may be from blood.

[0165] In one embodiment the diagnostic reference standard is a non-myeloid leukaemia reference standard, such as from a subject that does not have myeloid leukaemia (e.g. does not have CML or AML). Where the concentration of the cells are the same in the sample and diagnostic reference standard, this may indicate the absence of myeloid leukaemia.

[0166] Where the cell is a CMP cell an increased concentration of said cell in a sample when compared to said diagnostic reference standard may indicate the presence of myeloid leukaemia (preferably acute myeloid leukaemia, e.g. BP-CML). Likewise, no change in concentration of said cell in said sample when compared to the diagnostic reference standard may indicate the absence of myeloid leukaemia, or a decrease in concentration of said cell in said sample when compared to the diagnostic reference standard may indicate the presence of chronic phase chronic myeloid leukaemia (CP-CML). Where the cell is a MPP cell a decreased concentration of said cell in said sample when compared to the diagnostic reference standard may indicate the presence of myeloid leukaemia. Likewise, no change in concentration (or an increase in concentration) of said cell in said sample when compared to the diagnostic reference standard may indicate the absence of myeloid leukaemia. Where the cell is a LMPP cell an increased concentration of said cell in said sample when compared to the diagnostic reference standard may indicate the presence of myeloid leukaemia (preferably acute myeloid leukaemia, e.g. BP-CML). Likewise, no change in concentration (or a decrease in concentration) of said cell in said sample when compared to the diagnostic reference standard may indicate the absence of myeloid leukaemia or the presence of CP-CML or AP-CML. Where the cell is a GMP cell an increased concentration of said cell in said sample when compared to the diagnostic reference standard may indicate the presence of myeloid leukaemia (preferably acute myeloid leukaemia, e.g. BP-CML). Likewise, no change in concentration of said cell in said sample when compared to the diagnostic reference standard may indicate the absence of myeloid leukaemia, while a decrease in concentration of said cell may indicate the presence of CP-CML or AP-CML.

[0167] In one embodiment the diagnostic reference standard is a chronic phase chronic myeloid leukaemia (CP-CML) reference standard, e.g. is from a subject who has CP-CML. In another embodiment the diagnostic reference standard is an accelerated phase CML (AP-CML) (e.g. from a subject who has AP-CML). Where the concentration of the cells are the same in the sample and diagnostic reference standard, this may indicate the absence of myeloid leukaemia or the presence of CP-CML or AP-CML, respectively.

[0168] Where the cell is a CMP cell an increased concentration of said cell in said sample when compared to said diagnostic reference standard may indicate the presence of acute myeloid leukaemia (AML). Likewise, a decreased concentration or no change in concentration of said cell in said sample when compared to the diagnostic reference standard may indicate the absence AML. Where the cell is a MPP cell an increased concentration of said cell in said sample when compared to the diagnostic reference standard may indicate the presence of AML. Likewise, a decreased concentration or no change in concentration of said cell in said sample when compared to the diagnostic reference standard may indicate the absence of AML. Where the cell is a LMPP cell an increased concentration of said cell in said sample when compared to the diagnostic reference standard may indicate the presence of AML. Likewise, no change in concentration (or a decrease in concentration) of said cell in said sample when compared to the diagnostic reference standard may indicate the absence of AML (or the presence of CP-CML or AP-CML). Where the cell is a GMP cell an increased concentration of said cell in said sample when compared to the diagnostic reference standard may indicate the presence of AML. Likewise, no change in concentration of said cell in said sample when compared to the diagnostic reference standard may indicate the absence of myeloid leukaemia (or the presence of CP-CML or AP-CML).

[0169] Preferably the AML is BP-CML.

[0170] In one embodiment the diagnostic reference standard is an AML reference standard, such as from a subject with AML (e.g. BP-CML). In some embodiments where the concentration of the cells are the same in the sample and diagnostic reference standard, and/or in some embodiments wherein the concentration of cells in the sample is greater than in the diagnostic reference standard this may indicate the presence of AML.

[0171] Where the cell is a CMP cell an increased concentration or no change in concentration of said cell in said sample when compared to said diagnostic reference standard may indicate the presence of acute myeloid leukaemia (AML). Likewise, a decreased concentration of said cell in said sample when compared to the diagnostic reference standard may indicate the absence AML (or the presence of CP-CML or AP-CML). Where the cell is a MPP cell no change in concentration of said cell in said sample when compared to the diagnostic reference standard may indicate the presence of AML. Likewise, an increased or decreased concentration of said cell in said sample when compared to the diagnostic reference standard may indicate the absence of AML (or the presence of CP-CML or AP-CML). Where the cell is a LMPP cell an increased concentration or no change in concentration of said cell in said sample when compared to the diagnostic reference standard may indicate the presence of AML. Likewise, a decreased concentration of said cell in said sample when compared to the diagnostic reference standard may indicate the absence of AML (or the presence of CP-CML or AP-CML). Where the cell is a GMP cell an increased concentration or no change in concentration of said cell in said sample when compared to the diagnostic reference standard may indicate the presence of AML. Likewise, a decreased concentration of said cell in said sample when compared to the diagnostic reference standard may indicate the absence of myeloid leukaemia (or the presence of CP-CML or AP-CML).

[0172] Preferably the AML is BP-CML.

[0173] The increased or decreased concentration may be determined by any technique known to the skilled person. In one embodiment FACS is used to determine and quantify the concentration.

[0174] In one embodiment an increase in concentration is an increase of at least 0.5%, 1%, 2%, 3%, 4%, 5%, 6%, 7%, 8%, 9%, 10%, 11% or 12%. In one embodiment a decrease in concentration is a decrease of at least 0.5%, 1%, 2%, 3%, 4%, 5%, 6%, 7%, 8%, 9%, 10%, 11% or 12%.

[0175] The term “sample” as used herein refers to any sample containing a blood cell population. Suitably, the sample may be isolated from a subject suspected of having a myeloid leukaemia. In some embodiments the sample is isolated from a subject diagnosed as having a myeloid leukaemia.

[0176] The terms “subject” and “patient” are used synonymously herein. The “subject” may be a mammal, and preferably the subject is a human subject.

[0177] The sample may be a bone marrow or blood sample. The white blood cell population of the sample is preferably extracted or enriched prior to detection of the cell of the present invention. Methods suitable for extraction and/or enrichment of the white blood cells from a sample are conventional techniques known to those skilled in the art. By way of example, one approach is to deplete a sample of red blood cells by red cell lysis. Another approach is to isolate mononuclear cells by density centrifugation using a density media like Ficoll. CD34⁺ cells can be then be purified from mononuclear cells by incubation with magnetic beads coated with CD34 antibody and separating CD34⁺ cells using a magnet.

[0178] In one embodiment, the methods referred to herein are in vitro methods, such as ex vivo methods.

[0179] In one aspect the invention provides a method for identifying a therapeutic suitable for treating myeloid leukaemia, said method comprising:
[0180] a. contacting a sample with a therapeutic candidate, wherein said sample comprises LSCs;
[0181] b. incubating the sample and therapeutic candidate;
[0182] c. detecting the presence or absence of the LSCs; and
[0183] d. comparing the number of LSCs detected in c. with the number of LSCs detected in the isolated sample before step a.;
[0184] wherein the therapeutic candidate is identified as a therapeutic suitable for treating myeloid leukaemia when the relative number of LSCs is decreased after contact with the therapeutic candidate; or
[0185] wherein the therapeutic candidate is not identified as a therapeutic suitable for treating myeloid leukaemia when the relative number of LSCs is not decreased after contact with the therapeutic candidate; and
[0186] wherein the LSCs are detected by a method comprising:
   [0187] i. detecting expression of one or more genes selected from: MME, IFITM1, CMTM6, CD55, SLC35F5, CNTNAP2, PIGO, SHH, AQP11, PCDHB9, RHOA, TMEM231, SAMD8, ABCA13, TAPT1, NFASC, LEPROT, MCOLN2, IL6ST, EMP3, CD83, LPAR6, PIEZO2, DERL1, IL1RAP, LPAR4, SERPINE2, PKN2, VAMP2, TMCO3, VAMP7, PTPRC, TFRC, ILDR1, PDIA3, AIMP1, GPR63, CCR7, ATG9B, SLC9B1, CD99, LRP1, UBR4, ATP6AP2, TEX10, CNGB1, SPN, PILRB, JAM2, PDGFA, CD46, NDUFB1, GYPE, SLC12A8, SLC2A14, RNF19B, SPCS1, SLC35F6, CD36, ITM2B, GLG1, SMIM24, TMEM50A, HSPA5, ITGAX, SLC24A2, SLC2A3, RAB11FIP3, IL18R1, CCDC47, FZD4, SHISA9, SORCS1, CLIC4, MS4A2, MLNR, TIGIT, CNGA1, SIRPB2, PRRG4, VSTM4, TMEM107, NETO2, CSF1R, ADRB2, TLR2, FUT4, MGST1, CSF3R, HLA-B, ITGA10, SLC26A8, SIRPB1, RAET1E, ST3GAL6, LAMP1, and LGALS1 in the sample;
   [0188] ii. comparing the detected expression of said one or more genes to expression of said one or more genes in a reference standard; and
   [0189] iii. identifying the presence or absence of an LSC in said sample based on said comparison.

[0190] Preferably the method comprises detecting expression of one or more of: MME, IFITM1, CMTM6, CD55, SLC35F5, CNTNAP2, PIGO, SHH, AQP11, PCDHB9, RHOA, TMEM231, SAMD8, ABCA13, TAPT1, NFASC, LEPROT, MCOLN2, IL6ST, EMP3, CD83, LPAR6, PIEZO2, DERL1, IL1RAP, LPAR4, SERPINE2, PKN2, VAMP2, TMCO3, VAMP7, PTPRC, TFRC, ILDR1, PDIA3, AIMP1, GPR63, CCR7, ATG9B, SLC9B1, CD99, LRP1, UBR4, ATP6AP2, TEX10, CNGB1, SPN, PILRB, JAM2, PDGFA, CD46, NDUFB1, GYPE, SLC12A8, SLC2A14, RNF19B, SPCS1, SLC35F6, CD36, ITM2B, GLG1, SMIM24, TMEM50A, HSPA5, ITGAX, SLC24A2, SLC2A3, RAB11FIP3, IL18R1, CCDC47, FZD4, SHISA9, SORCS1, and CLIC4.

[0191] In related aspects, the invention provides a method for identifying a therapeutic suitable for treating myeloid leukaemia, said method comprising:
[0192] a. contacting a sample with a therapeutic candidate, wherein said sample comprises LSCs comprising a cell surface polypeptide marker phenotype:
[0193] i. CD34⁺; CD45RA⁻; CD123⁺; and CD38⁺; or
[0194] ii. CD34⁺, CD45RA⁻; CD90⁻; and CD38⁻;
[0195] wherein (+) indicates the presence and (−) indicates the absence of said cell surface polypeptide markers;
[0196] b. incubating the sample and therapeutic candidate;
[0197] c. detecting the presence or absence of the LSCs; and
[0198] d. comparing the number of LSCs detected in c. with the number of LSCs detected in the isolated sample before step a.;
[0199] wherein the therapeutic candidate is identified as a therapeutic suitable for treating myeloid leukaemia when the relative number of LSCs is decreased after contact with the therapeutic candidate; or
[0200] wherein the therapeutic candidate is not identified as a therapeutic suitable for treating myeloid leukaemia when the relative number of LSCs is not decreased after contact with the therapeutic candidate.

[0201] In one aspect the invention provides a method for monitoring efficacy of a therapeutic molecule in treating myeloid leukaemia, said method comprising:
[0202] a. providing an isolated sample from a patient administered the therapeutic molecule;
[0203] b. detecting the presence or absence of LSCs in said sample;
[0204] c. determining the relative number of said LSCs by comparing the number of LSCs detected in b. with the number of LSCs present in an isolated sample from the patient prior to administration of the therapeutic molecule;
[0205] d. confirming efficacy of the therapeutic molecule by identifying a relative decrease in the number of LSCs after contact with the therapeutic molecule; or confirming the absence of efficacy of the therapeutic molecule by identifying no decrease or an increase in the number of LSCs after contact with the therapeutic molecule; and wherein the LSCs are detected by a method comprising:
   [0206] i. detecting expression of one or more genes selected from: MME, IFITM1, CMTM6, CD55, SLC35F5, CNTNAP2, PIGO, SHH, AQP11, PCDHB9, RHOA, TMEM231, SAMD8, ABCA13, TAPT1, NFASC, LEPROT, MCOLN2, IL6ST, EMP3, CD83, LPAR6, PIEZO2, DERL1, IL1RAP, LPAR4, SERPINE2, PKN2, VAMP2, TMCO3, VAMP7, PTPRC, TFRC, ILDR1, PDIA3, AIMP1, GPR63, CCR7, ATG9B, SLC9B1, CD99, LRP1, UBR4, ATP6AP2, TEX10, CNGB1, SPN, PILRB, JAM2, PDGFA, CD46, NDUFB1, GYPE, SLC12A8, SLC2A14, RNF19B, SPCS1, SLC35F6, CD36, ITM2B, GLG1, SMIM24, TMEM50A, HSPA5, ITGAX, SLC24A2, SLC2A3, RAB11FIP3, IL18R1, CCDC47, FZD4, SHISA9, SORCS1, CLIC4, MS4A2, MLNR, TIGIT, CNGA1, SIRPB2, PRRG4, VSTM4, TMEM107, NETO2, CSF1R, ADRB2, TLR2, FUT4, MGST1, CSF3R, HLA-B, ITGA10, SLC26A8, SIRPB1, RAET1E, ST3GAL6, LAMP1, and LGALS1 in the sample;
   [0207] ii. comparing the detected expression of said one or more genes to expression of said one or more genes in a reference standard; and
   [0208] iii. identifying the presence or absence of an LSC in said sample based on said comparison.

[0209] Preferably the method comprises detecting the presence of one or more of: MME, IFITM1, CMTM6, CD55, SLC35F5, CNTNAP2, PIGO, SHH, AQP11, PCDHB9, RHOA, TMEM231, SAMD8, ABCA13, TAPT1, NFASC, LEPROT, MCOLN2, IL6ST, EMP3, CD83, LPAR6, PIEZO2, DERL1, IL1RAP, LPAR4, SERPINE2, PKN2, VAMP2, TMCO3, VAMP7, PTPRC, TFRC, ILDR1, PDIA3, AIMP1, GPR63, CCR7, ATG9B, SLC9B1, CD99, LRP1, UBR4, ATP6AP2, TEX10, CNGB1, SPN, PILRB, JAM2, PDGFA, CD46, NDUFB1, GYPE, SLC12A8, SLC2A14, RNF19B, SPCS1, SLC35F6, CD36, ITM2B, GLG1, SMIM24, TMEM50A, HSPA5, ITGAX, SLC24A2, SLC2A3, RAB11FIP3, IL18R1, CCDC47, FZD4, SHISA9, SORCS1, and CLIC4.

[0210] In a related aspect the invention provides a method for monitoring efficacy of a therapeutic molecule in treating myeloid leukaemia, said method comprising:
[0211] a. providing an isolated sample from a patient administered the therapeutic molecule;
[0212] b. detecting the presence or absence of LSCs in said sample, wherein said LSC comprises a cell surface polypeptide marker phenotype:
[0213] i. CD34⁺; CD45RA⁻; CD123⁺; and CD38⁺; or
[0214] ii. CD34⁺, CD45RA⁻; CD90⁻; and CD38⁻;
[0215] wherein (+) indicates the presence and (−) indicates the absence of said cell surface polypeptide markers;
[0216] c. determining the relative number of said LSCs by comparing the number of LSCs detected in b. with the number of LSCs present in an isolated sample from the
[0217] patient prior to administration of the therapeutic molecule;
[0218] d. confirming efficacy of the therapeutic molecule by identifying a relative decrease in the number of LSCs after administration with the therapeutic molecule; or
[0219] confirming the absence of efficacy of the therapeutic molecule by identifying no decrease or an increase in the number of LSCs after administration with the therapeutic molecule.

[0220] The methods described herein may also comprise a step of treating a myeloid leukaemia. In one aspect, the invention provides a method of treating myeloid leukaemia comprising:
[0221] a. obtaining the results of a method of the invention; and
[0222] b. treating myeloid leukaemia when myeloid leukaemia is diagnosed or when said LSC is present (preferably when said LSC is present).

[0223] Said method may preferably further comprise:
[0224] c. detecting whether the LSC is present after treatment (e.g. using a gene expression profile or method described herein); and
[0225] d. re-administering said treatment when said LSC is present.

[0226] In certain embodiments, the treatment may be administration of a medicament such as a therapeutic agent, e.g. a chemotherapeutic agent, allogeneic stem cell/bone marrow transplant or a treatment regimen such as radiotherapy. Typical chemotherapeutic agents may include anthracyclines (e.g. daunorubicin), purine analogues (e.g. fludarabine), cytarabine and epigenetic modifiers such as Azacitidine. Supportive therapies (e.g. to treat one or more symptoms of myeloid leukaemia) may also be offered in the form of blood product transfusion and antibiotic treatment of infections.

[0227] There is also provided a method comprising detecting expression of one or more genes selected from: MME, IFITM1, CMTM6, CD55, SLC35F5, CNTNAP2, PIGO, SHH, AQP11, PCDHB9, RHOA, TMEM231, SAMD8, ABCA13, TAPT1, NFASC, LEPROT, MCOLN2, IL6ST, EMP3, CD83, LPAR6, PIEZO2, DERL1, IL1RAP, LPAR4, SERPINE2, PKN2, VAMP2, TMCO3, VAMP7, PTPRC, TFRC, ILDR1, PDIA3, AIMP1, GPR63, CCR7, ATG9B, SLC9B1, CD99, LRP1, UBR4, ATP6AP2, TEX10, CNGB1, SPN, PILRB, JAM2, PDGFA, CD46, NDUFB1, GYPE, SLC12A8, SLC2A14, RNF19B, SPCS1, SLC35F6, CD36, ITM2B, GLG1, SMIM24, TMEM50A, HSPA5, ITGAX, SLC24A2, SLC2A3, RAB11FIP3, IL18R1, CCDC47, FZD4, SHISA9, SORCS1, CLIC4, MS4A2, MLNR, TIGIT, CNGA1, SIRPB2, PRRG4, VSTM4, TMEM107, NETO2, CSF1R, ADRB2, TLR2, FUT4, MGST1, CSF3R, HLA-B, ITGA10, SLC26A8, SIRPB1, RAET1E, ST3GAL6, LAMP1, and LGALS1.

[0228] Preferably the method comprises detecting expression of one or more genes selected from: MME, IFITM1, CMTM6, CD55, SLC35F5, CNTNAP2, PIGO, SHH, AQP11, PCDHB9, RHOA, TMEM231, SAMD8, ABCA13, TAPT1, NFASC, LEPROT, MCOLN2, IL6ST, EMP3, CD83, LPAR6, PIEZO2, DERL1, IL1RAP, LPAR4, SERPINE2, PKN2, VAMP2, TMCO3, VAMP7, PTPRC, TFRC, ILDR1, PDIA3, AIMP1, GPR63, CCR7, ATG9B, SLC9B1, CD99, LRP1, UBR4, ATP6AP2, TEX10, CNGB1, SPN, PILRB, JAM2, PDGFA, CD46, NDUFB1, GYPE, SLC12A8, SLC2A14, RNF19B, SPCS1, SLC35F6, CD36, ITM2B, GLG1, SMIM24, TMEM50A, HSPA5, ITGAX, SLC24A2, SLC2A3, RAB11FIP3, IL18R1, CCDC47, FZD4, SHISA9, SORCS1, and CLIC4.

[0229] In another aspect there is provided a method comprising detecting the presence or absence of a leukaemic stem cell (LSC) in a sample; wherein the LSC comprises a cell surface polypeptide marker phenotype:
[0230] a. CD34⁺; CD45RA⁻; CD123⁺; and CD38⁺; or
[0231] b. CD34⁺, CD45RA⁻; CD90⁻; and CD38⁻;
   wherein (+) indicates the presence and (−) indicates the absence of said cell surface polypeptide markers.

[0232] Embodiments described herein in respect of methods of the invention are intended to be applied to other methods of the invention, the uses, LSCs, kits, and compositions, and vice versa.

### Sequence Identity

[0233] Any of a variety of sequence alignment methods can be used to determine percent identity, including, without limitation, global methods, local methods and hybrid methods, such as, e.g., segment approach methods. Protocols to determine percent identity are routine procedures within the scope of one skilled in the art. Global methods align sequences from the beginning to the end of the molecule and determine the best alignment by adding up scores of individual residue pairs and by imposing gap penalties. Non-limiting methods include, e.g., CLUSTAL W, see, e.g., Julie D. Thompson et al., CLUSTAL W: Improving the Sensitivity of Progressive Multiple Sequence Alignment Through Sequence Weighting, Position-Specific Gap Penalties and Weight Matrix Choice, 22(22) Nucleic Acids Research 4673-4680 (1994); and iterative refinement, see, e.g., Osamu Gotoh, Significant Improvement in Accuracy of Multiple Protein. Sequence Alignments by Iterative Refinement as Assessed by Reference to Structural Alignments, 264(4) J. Mol. Biol. 823-838 (1996). Local methods align sequences by identifying one or more conserved motifs shared by all of the input sequences. Non-limiting methods include, e.g., Match-box, see, e.g., Eric Depiereux and Ernest Feytmans, Match-Box: A Fundamentally New Algorithm for the Simultaneous Alignment of Several Protein Sequences, 8(5) CABIOS 501-509 (1992); Gibbs sampling, see, e.g., C. E. Lawrence et al., Detecting Subtle Sequence Signals: A Gibbs Sampling Strategy for Multiple Alignment, 262(5131) Science 208-214 (1993); Align-M, see, e.g., Ivo Van Walle et al., Align-M—A New Algorithm for Multiple Alignment of Highly Divergent Sequences, 20(9) Bioinformatics:1428-1435 (2004). Thus, percent sequence identity is determined by conventional methods. See, for example, Altschul et al., Bull. Math. Bio. 48: 603-16, 1986 and Henikoff and Henikoff, Proc. Natl. Acad. Sci. USA 89:10915-19, 1992. Briefly, two amino acid sequences are aligned to optimize the alignment scores using a gap opening penalty of 10, a gap extension penalty of 1, and the “blosum 62” scoring matrix of Henikoff and Henikoff (ibid.) as shown below (amino acids are indicated by the standard one-letter codes).

ALIGNMENT SCORES FOR DETERMINING SEQUENCE IDENTITY
A R N D C Q E G H I L K M F P S T W Y V
A 4
R −1 5
N −2 0 6
D −2 −2 1 6
C 0 −3 −3 −3 9
Q −1 1 0 0 −3
E −1 0 0 2 −4 2 5
G 0 −2 0 −1 −3 −2 −2 6
H −2 0 1 −1 −3 0 0 −2 8
I −1 −3 −3 −3 −1 −3 −3 −4 −3 4
L −1 −2 −3 −4 −1 −2 −3 −4 −3 2 4
K −1 2 0 −1 −3 1 1 −2 −1 −3 −2 5
M −1 −1 −2 −3 −1 0 −2 −3 −2 1 2 −1 5
F −2 −3 −3 −3 −2 −3 −3 −3 −1 0 0 −3 0 6
P −1 −2 −2 −1 −3 −1 −1 −2 −2 −3 −3 −1 −2 −4 7
S 1 −1 1 0−1 0 0 0 −1 −2 −2 0 −1 −2 −1 4
T 0 −1 0 −1 −1 −1 −1 −2 −2 −1 −1 −1 −1 −2 −1 1 5 −2
11
W −3 −3 −4 −4 −2 −2 −3 −2 −2 −3 −2 −3 −1 1 −4 −3
Y −2 −2 −2 −3 −2 −1 −2 −3 2 −1 −1 −2 −1 3 −3 −2 −2
2 7
V 0 −3 −3 −3 −1 −2 −2 −3 −3 3 1 −2 1 −1 −2 −2 0 −3
−1 4

[0234] The percent identity is then calculated as:

$$\frac{Total number of identical matches}{\begin{matrix}[ length of the longer sequence plus the \\ number of gaps introduced into the longer \\ sequence in order to align the two sequences ]\end{matrix}} \times 100$$

[0235] Unless defined otherwise, all technical and scientific terms used herein have the same meaning as commonly understood by one of ordinary skill in the art to which this disclosure belongs. Singleton, et al., DICTIONARY OF MICROBIOLOGY AND MOLECULAR BIOLOGY, 20 ED., John Wiley and Sons, New York (1994), and Hale & Marham, THE HARPER COLLINS DICTIONARY OF BIOLOGY, Harper Perennial, NY (1991) provide the skilled person with a general dictionary of many of the terms used in this disclosure.

[0236] This disclosure is not limited by the exemplary methods and materials disclosed herein, and any methods and materials similar or equivalent to those described herein can be used in the practice or testing of embodiments of this disclosure. Numeric ranges are inclusive of the numbers defining the range. Unless otherwise indicated, any nucleic acid sequences are written left to right in 5′ to 3′ orientation; amino acid sequences are written left to right in amino to carboxy orientation, respectively. The headings provided herein are not limitations of the various aspects or embodiments of this disclosure.

[0237] Amino acids are referred to herein using the name of the amino acid, the three letter abbreviation or the single letter abbreviation. The term “protein”, as used herein, includes proteins, polypeptides, and peptides. As used herein, the term “amino acid sequence” is synonymous with the term “polypeptide” and/or the term “protein”. In some instances, the term “amino acid sequence” is synonymous with the term “peptide”. In some instances, the term “amino acid sequence” is synonymous with the term “enzyme”. The terms “protein” and “polypeptide” are used interchangeably herein. In the present disclosure and claims, the conventional one-letter and three-letter codes for amino acid residues may be used. The 3-letter code for amino acids as defined in conformity with the IUPACIUB Joint Commission on Biochemical Nomenclature (JCBN). It is also understood that a polypeptide may be coded for by more than one nucleotide sequence due to the degeneracy of the genetic code.

[0238] Other definitions of terms may appear throughout the specification. Before the exemplary embodiments are described in more detail, it is to be understood that this disclosure is not limited to particular embodiments described, and as such may vary. It is also to be understood that the terminology used herein is for the purpose of describing particular embodiments only, and is not intended to be limiting, since the scope of the present disclosure will be defined only by the appended claims.

[0239] Where a range of values is provided, it is understood that each intervening value, to the tenth of the unit of the lower limit unless the context clearly dictates otherwise, between the upper and lower limits of that range is also specifically disclosed. Each smaller range between any stated value or intervening value in a stated range and any other stated or intervening value in that stated range is encompassed within this disclosure. The upper and lower limits of these smaller ranges may independently be included or excluded in the range, and each range where either, neither or both limits are included in the smaller ranges is also encompassed within this disclosure, subject to any specifically excluded limit in the stated range. Where the stated range includes one or both of the limits, ranges excluding either or both of those included limits are also included in this disclosure.

[0240] It must be noted that as used herein and in the appended claims, the singular forms “a”, “an”, and “the” include plural referents unless the context clearly dictates otherwise. Thus, for example, reference to “a LSC” includes a plurality of such candidate agents and reference to “the LSC” includes reference to one or more fatty acids and equivalents thereof known to those skilled in the art.

[0241] The publications discussed herein are provided solely for their disclosure prior to the filing date of the present application. Nothing herein is to be construed as an admission that such publications constitute prior art to the claims appended hereto.

### BRIEF DESCRIPTION OF THE DRAWINGS

[0242] Embodiments of the invention will now be described, by way of example only, with reference to the following Figures and Examples.

[0243] FIG. 1 shows expansion of LMPP- and GMP-like and MPP- and CMP-like populations in myeloid BP-CML. Representative FACS plots of CD34+ enriched (A) normal bone marrow; (B) CP-CML; (C) AP-CML; myeloid BP-CML with (D) MPP-like and CMP-like populations; or (E) LMPP-like and GMP-like populations. Numbers of samples studied is shown on the right. Markers studied are shown below plots. Numbers in gates are the mean of all samples within the group expressed as a % of Lin-CD34+ cells.

[0244] FIG. 2 shows dynamic changes in immunophenotypic compartments in the progression from CP to BP-CML. (A) Bar graphs of mean sizes of indicated populations (x-axis) as a percentage of bone marrow Lin-CD34+ population (y-axis). Error bar corresponds to standard error of the mean, *P<0.05: **P<0.01; **P<0.001. (B) Tabular representation of the data in (A).

[0245] FIG. 3 shows functional LSC activity in Myeloid BP-CML. (A) Purities of immunophenotypic populations (expressed as %), after FACS sorting, used in primary xenotransplantation from 5 patients (COL091, COL091R, CML371, CML002 and HER002). (B) Number of mice with human cell engraftment above engraftment threshold (defined as 0.1% human CD45+CD33+CD19− cells) out of the total number of mice injected. Myeloid engraftment or absence of engraftment is indicated. ND, non-detected. (C) Primary engraftment (4 patients—COL091, COL091R, CML371, and CML002—x-axis) in 1-6 mice from the indicated population. Black and white-centred dots show the engraftment level in individual mice. Y-axis: mean % human (h)CD45+CD33+CD19− cell engraftment/total live MNC. X-axis: injected cell fraction. Dashed horizontal line: engraftment threshold. (D) Number of human cells (Y-axis) injected in primary mice from indicated population from 4 patients, COL091, CML371, COL091R and CML002 (x-axis) in 1-6 mice. Black dots: engrafted mice. White-centred dots: mice that failed to engraft above the engraftment level of 0.1%.

[0246] FIG. 4 shows hierarchical relationships of normal HSPCs are not maintained in BPCML. (A) Percentage purities of population, after FACS sorting, injected for secondary transplant from 2 patients (COL091, CML002). (B) Secondary engraftment of cells from 2 patients (COL091 and CML002). X-axis: Bottom: patient sample populations injected into primary mice. Top: population from primary engrafted mouse injected into secondary recipient. Y-axis: mean % human (h)CD45+CD33+CD19− cell engraftment/total live MNC. Dashed horizontal line: engraftment threshold. Each dot represents one injected mouse: Black dots: engrafted mice. White-centred dots: mice that failed to engraft.

[0247] FIG. 5 shows clonal structures of stem/progenitor populations in Myeloid BP-CML. (A-C) Data from patients CML002, COL091 and COL091R. Clone identities denoted by circles or bars. i) Immunophenotypic HSPC populations in patient sample. Y-axis: Proportion of population as % of Lin-CD34+ cells. ii) Clonal composition of purified patient populations is based on FISH analysis. X-axis: HSPC population. Y-axis: Frequency of clones per population. iii) Clonal hierarchies inferred from FISH data (D) FISH images: ABL (red); BCR (green), BCR-ABL fusion (F), p53/17p13 (gold), MPO/17q22 (aqua). Atypical BCR-ABL is defined by 1 or 3 BCR-ABL fusions. 17p13 loss is defined by p53 loss. Isochrosome 17q is defined by 3 MPO signals. Numbers of signals detected is indicated for each sample.

[0248] FIG. 6 shows analysis of clonal structures in NSG mice after transplantation of stem/progenitor populations. Frequency and type of leukemic clones in individual engrafted mice. Injected populations indicated. Results from 1° (A, B, C) and 2° transplantation (A and B) are shown. NA: cells unavailable for FISH analysis.

[0249] FIG. 7 shows increased expression of MLNR, TIGIT, and CNGA1 for MPP cells compared to other HSCs and progenitor cells.

[0250] FIG. 8 shows increased expression of MME for LMPP cells compared to other HSCs and progenitor cells (except for MLP cells).

[0251] FIG. 9 shows increased expression of MS4A2 for CMP cells compared to other HSCs and progenitor cells.

[0252] FIG. 10 shows increased expression of SIRPB2, PRRG4, VSTM4, TMEM107, NETO2, CSF1R, ADRB2, TLR2, FUT4, MGST1, CSF3R, HLA-B, ITGA10, SLC26A8, SIRPB1, RAET1E, ST3GAL6, LAMP1, LGALS1, and ILDR1 for GMP cells compared to other HSCs and progenitor cells.

[0253] FIG. 11 shows expression of levels of GYPE, MME, CCR7, CNTNAP2, ABCA13, SHH, ILDR1, LRP1, TMEM231, NFASC, MCOLN2, SLC24A2, SMIM24, NDUFB1, RAB11FIP3, SPN, JAM2, PIGO, SERPINE2, PILRB, ATG9B, SLC35F6, GPR63, GLG1, SLC35F5, PCDHB9, DERL1, FZD4, PKN2, CD46, CD55, LEPROT, CD83, HSPA5, TMCO3, TFRC, PDIA3, SLC9B1, TEX10, AQP11, SHISA9, CD99, SORCS1, IL1RAP, ITM2B, VAMP2, CNGB1, UBR4, RHOA, EMP3, CMTM6, SAMD8, IL6ST, SLC2A14, TAPT1, SLC12A8, CCDC47, LPAR4, CLIC4, SLC2A3, VAMP7, PTPRC, ITGAX, PIEZO2, IL18R1, PDGFA, IFITM1, ATP6AP2, RNF19B, CD36, LPAR6, TMEM50A, AIMP1, and SPCS1 (from top to bottom) for LSC LMPPs and GMPs compared to non-LSC LMPPs and GMPs.

SEQUENCE LISTING

| | Nucleotide/ | | |
|---|---|---|---|
| SEQ ID NO. | Polypeptide ID | Sequence Type | GenBank Accession Number |
| SEQ ID NO. 1 | MME | Genomic DNA | NC_000003.12 |
| SEQ ID NO. 2 | IFITM1 | Genomic DNA | NC_000011.10 |
| SEQ ID NO. 3 | CMTM6 | Genomic DNA | NC_000003.12 |
| SEQ ID NO. 4 | CD55 | Genomic DNA | NC_000001.11 |
| SEQ ID NO. 5 | SLC35F5 | Genomic DNA | NC_000002.12 |
| SEQ ID NO. 6 | CNTNAP2 | Genomic DNA | NC_000007.14 |
| SEQ ID NO. 7 | PIGO | Genomic DNA | NC_000009.12 |
| SEQ ID NO. 8 | SHH | Genomic DNA | NC_000007.14 |
| SEQ ID NO. 9 | AQP11 | Genomic DNA | NC_000011.10 |
| SEQ ID NO. 10 | PCDHB9 | Genomic DNA | NC_000005.10 |
| SEQ ID NO. 11 | RHOA | Genomic DNA | NC_000003.12 |
| SEQ ID NO. 12 | TMEM231 | Genomic DNA | NC_000016.10 |
| SEQ ID NO. 13 | SAMD8 | Genomic DNA | NC_000010.11 |
| SEQ ID NO. 14 | ABCA13 | Genomic DNA | NC_000007.14 |
| SEQ ID NO. 15 | TAPT1 | Genomic DNA | NC_000004.12 |
| SEQ ID NO. 16 | NFASC | Genomic DNA | NC_000001.11 |
| SEQ ID NO. 17 | LEPROT | Genomic DNA | NC_000001.11 |
| SEQ ID NO. 18 | MCOLN2 | Genomic DNA | NC_000001.11 |
| SEQ ID NO. 19 | IL6ST | Genomic DNA | NC_000005.10 |
| SEQ ID NO. 20 | EMP3 | Genomic DNA | NC_000019.10 |
| SEQ ID NO. 21 | CD83 | Genomic DNA | NC_000006.12 |
| SEQ ID NO. 22 | LPAR6 | Genomic DNA | NC_000013.11 |
| SEQ ID NO. 23 | PIEZO2 | Genomic DNA | NC_000018.10 |
| SEQ ID NO. 24 | DERL1 | Genomic DNA | NC_000008.11 |
| SEQ ID NO. 25 | IL1RAP | Genomic DNA | NC_000003.12 |
| SEQ ID NO. 26 | LPAR4 | Genomic DNA | NC_000023.11 |
| SEQ ID NO. 27 | SERPINE2 | Genomic DNA | NC_000002.12 |
| SEQ ID NO. 28 | PKN2 | Genomic DNA | NC_000001.11 |
| SEQ ID NO. 29 | VAMP2 | Genomic DNA | NC_000017.11 |
| SEQ ID NO. 30 | TMCO3 | Genomic DNA | NC_000013.11 |
| SEQ ID NO. 31 | VAMP7 | Genomic DNA | NC_000023.11 |
| SEQ ID NO. 32 | PTPRC | Genomic DNA | NC_000001.11 |
| SEQ ID NO. 33 | TRFC | Genomic DNA | NC_000003.12 |
| SEQ ID NO. 34 | ILDR1 | Genomic DNA | NC_000003.12 |
| SEQ ID NO. 35 | PDIA3 | Genomic DNA | NC_000015.10 |
| SEQ ID NO. 36 | AIMP1 | Genomic DNA | NC_000004.12 |
| SEQ ID NO. 37 | GPR63 | Genomic DNA | NC_000006.12 |
| SEQ ID NO. 38 | CCR7 | Genomic DNA | NC_000017.11 |
| SEQ ID NO. 39 | ATG9B | Genomic DNA | NC_000007.14 |
| SEQ ID NO. 40 | SLC9B1 | Genomic DNA | NC_000004.12 |
| SEQ ID NO. 41 | CD99 | Genomic DNA | NC_000023.11 |
| SEQ ID NO. 42 | LRP1 | Genomic DNA | NC_000012.12 |
| SEQ ID NO. 43 | UBR4 | Genomic DNA | NC_000001.11 |
| SEQ ID NO. 44 | ATP6AP2 | Genomic DNA | NC_000023.11 |
| SEQ ID NO. 45 | TEX10 | Genomic DNA | NC_000009.12 |
| SEQ ID NO. 46 | CNGB1 | Genomic DNA | NC_000016.10 |
| SEQ ID NO. 47 | SPN | Genomic DNA | NC_000016.10 |
| SEQ ID NO. 48 | PILRB | Genomic DNA | NC_000007.14 |
| SEQ ID NO. 49 | JAM2 | Genomic DNA | NC_000021.9 |
| SEQ ID NO. 50 | PDGFA | Genomic DNA | NC_000007.14 |
| SEQ ID NO. 51 | CD46 | Genomic DNA | NC_000001.11 |
| SEQ ID NO. 52 | NDUFB1 | Genomic DNA | NC_000014.9 |
| SEQ ID NO. 53 | GYPE | Genomic DNA | NC_000004.12 |
| SEQ ID NO. 54 | SLC12A8 | Genomic DNA | NC_000003.12 |
| SEQ ID NO. 55 | SLC2A14 | Genomic DNA | NC_000012.12 |
| SEQ ID NO. 56 | RNF19B | Genomic DNA | NC_000001.11 |
| SEQ ID NO. 57 | SPCS1 | Genomic DNA | NC_000003.12 |
| SEQ ID NO. 58 | SLC35F6 | Genomic DNA | NC_000002.12 |
| SEQ ID NO. 59 | CD36 | Genomic DNA | NC_000007.14 |
| SEQ ID NO. 60 | ITM2B | Genomic DNA | NC_000013.11 |
| SEQ ID NO. 61 | GLG1 | Genomic DNA | NC_000016.10 |
| SEQ ID NO. 62 | SMIM24 | Genomic DNA | NC_000019.10 |
| SEQ ID NO. 63 | TMEM50A | Genomic DNA | NC_000001.11 |
| SEQ ID NO. 64 | HSPA5 | Genomic DNA | NC_000009.12 |
| SEQ ID NO. 65 | ITGAX | Genomic DNA | NC_000016.10 |
| SEQ ID NO. 66 | SLC24A2 | Genomic DNA | NC_000009.12 |
| SEQ ID NO. 67 | SLC2A3 | Genomic DNA | NC_000012.12 |
| SEQ ID NO. 68 | RAB11FIP3 | Genomic DNA | NC_000016.10 |
| SEQ ID NO. 69 | IL18R1 | Genomic DNA | NC_000002.12 |
| SEQ ID NO. 70 | CCDC47 | Genomic DNA | NC_000017.11 |
| SEQ ID NO. 71 | FZD4 | Genomic DNA | NC_000011.10 |
| SEQ ID NO. 72 | SHISA9 | Genomic DNA | NC_000016.10 |
| SEQ ID NO. 73 | SORCS1 | Genomic DNA | NC_000010.11 |
| SEQ ID NO. 74 | CLIC4 | Genomic DNA | NC_000001.11 |
| SEQ ID NO. 75 | MS4A2 | Genomic DNA | NC_000011.10 |
| SEQ ID NO. 76 | MLNR | Genomic DNA | NC_000013.11 |
| SEQ ID NO. 77 | TIGIT | Genomic DNA | NC_000003.12 |
| SEQ ID NO. 78 | CNGA1 | Genomic DNA | NC_000004.12 |
| SEQ ID NO. 79 | SIRPB2 | Genomic DNA | NC_000020.11 |
| SEQ ID NO. 80 | PRRG4 | Genomic DNA | NC_000011.10 |
| SEQ ID NO. 81 | VSTM4 | Genomic DNA | NC_000010.11 |
| SEQ ID NO. 82 | TMEM107 | Genomic DNA | NC_000017.11 |
| SEQ ID NO. 83 | NETO2 | Genomic DNA | NC_000016.10 |
| SEQ ID NO. 84 | CSF1R | Genomic DNA | NC_000005.10 |
| SEQ ID NO. 85 | ADRB2 | Genomic DNA | NC_000005.10 |
| SEQ ID NO. 86 | TLR2 | Genomic DNA | NC_000004.12 |
| SEQ ID NO. 87 | FUT4 | Genomic DNA | NC_000011.10 |
| SEQ ID NO. 88 | MGST1 | Genomic DNA | NC_000012.12 |
| SEQ ID NO. 89 | CSF3R | Genomic DNA | NC_000001.11 |
| SEQ ID NO. 90 | HLA-B | Genomic DNA | NC_000006.12 |
| SEQ ID NO. 91 | ITGA10 | Genomic DNA | NC_000001.11 |
| SEQ ID NO. 92 | SLC26A8 | Genomic DNA | NC_000006.12 |
| SEQ ID NO. 93 | SIRPB1 | Genomic DNA | NC_000020.11 |
| SEQ ID NO. 94 | RAET1E | Genomic DNA | NC_000006.12 |
| SEQ ID NO. 95 | ST3GAL6 | Genomic DNA | NC_000003.12 |
| SEQ ID NO. 96 | LAMP1 | Genomic DNA | NC_000013.11 |
| SEQ ID NO. 97 | LGALS1 | Genomic DNA | NC_000022.11 |
| SEQ ID NO. 98 | MME | cDNA Transcript | NM_000902.3 |
| | | Variant 1 | |
| SEQ ID NO. 99 | MME | cDNA Transcript | NM_001354642.1 |
| | | Variant 3 | |
| SEQ ID NO. 100 | MME | cDNA Transcript | NM_001354643.1 |
| | | Variant 4 | |
| SEQ ID NO. 101 | MME | cDNA Transcript | NM_001354644.1 |
| | | Variant 5 | |
| SEQ ID NO. 102 | MME | cDNA Transcript | NM_007287.2 |
| | | Variant 1bis | |
| SEQ ID NO. 103 | MME | cDNA Transcript | NM_007288.3 |
| | | Variant 2a | |
| SEQ ID NO. 104 | MME | cDNA Transcript | NM_007289.3 |
| | | Variant 2b | |
| SEQ ID NO. 105 | MME | Amino Acid | NP_000893.2 |
| | | Sequence | |
| SEQ ID NO. 106 | MME | Amino Acid | NP_001341571.1 |
| | | Sequence | |
| SEQ ID NO. 107 | MME | Amino Acid | NP_001341572.1 |
| | | Sequence | |
| SEQ ID NO. 108 | MME | Amino Acid | NP_001341573.1 |
| | | Sequence | |
| SEQ ID NO. 109 | MME | Amino Acid | NP_009218.2 |
| | | Sequence | |
| SEQ ID NO. 110 | MME | Amino Acid | NP_009219.2 |
| | | Sequence | |
| SEQ ID NO. 111 | MME | Amino Acid | NP_009220.2 |
| | | Sequence | |
| SEQ ID NO. 112 | MME | mRNA Transcript | NM_007287.2 |
| | | Variant 1bis | |
| SEQ ID NO. 113 | MME | mRNA Transcript | NM_000902.3 |
| | | Variant 1 | |
| SEQ ID NO. 114 | MME | mRNA Transcript | XM_011512856.2 |
| | | Variant X2 | |
| SEQ ID NO. 115 | MME | mRNA Transcript | XM_011512857.2 |
| | | Variant X4 | |
| SEQ ID NO. 116 | MME | mRNA Transcript | XM_006713647.3 |
| | | Variant X5 | |
| SEQ ID NO. 117 | MME | mRNA Transcript | NM_007289.3 |
| | | Variant 2b | |
| SEQ ID NO. 118 | MME | mRNA Transcript | NM_007288.3 |
| | | Variant 2a | |
| SEQ ID NO. 119 | MME | mRNA Transcript | NM_001354643.1 |
| | | Variant 4 | |
| SEQ ID NO. 120 | MME | mRNA Transcript | NM_001354644.1 |
| | | Variant 5 | |
| SEQ ID NO. 121 | MME | mRNA Transcript | NM_001354642.1 |
| | | Variant 3 | |
| SEQ ID NO. 122 | IFITM1 | mRNA | NM_003641.3 |
| SEQ ID NO. 123 | CMTM6 | mRNA | NM_017801.2 |
| SEQ ID NO. 124 | CD55 | mRNA Transcript | NM_000574.4 |
| | | Variant 1 | |
| SEQ ID NO. 125 | CD55 | mRNA Transcript | NM_001114752.2 |
| | | Variant 2 | |
| SEQ ID NO. 126 | CD55 | mRNA Transcript | NM_001300902.1 |
| | | Variant 5 | |
| SEQ ID NO. 127 | CD55 | mRNA Transcript | NM_001300903.1 |
| | | Variant 6 | |
| SEQ ID NO. 128 | CD55 | mRNA Transcript | NM_001300904.1 |
| | | Variant 7 | |
| SEQ ID NO. 129 | CD55 | non-coding RNA | NR_125349.1 |
| | | Transcript Variant 8 | |
| SEQ ID NO. 130 | CD55 | mRNA Transcript | XM_017000467.1 |
| | | Variant X1 | |
| SEQ ID NO. 131 | SLC35F5 | mRNA Transcript | XM_017005027.1 |
| | | Variant X2 | |
| SEQ ID NO. 132 | SLC35F5 | mRNA Transcript | XM_011511922.2 |
| | | Variant X3 | |
| SEQ ID NO. 133 | SLC35F5 | mRNA Transcript | XM_011511923.2 |
| | | Variant X4 | |
| SEQ ID NO. 134 | SLC35F5 | mRNA Transcript | NM_001330314.1 |
| | | Variant 3 | |
| SEQ ID NO. 135 | SLC35F5 | mRNA Transcript | NM_025181.4 |
| | | Variant 1 | |
| SEQ ID NO. 136 | SLC35F5 | mRNA Transcript | NM_001330317.1 |
| | | Variant 6 | |
| SEQ ID NO. 137 | SLC35F5 | mRNA Transcript | NM_001330316.1 |
| | | Variant 5 | |
| SEQ ID NO. 138 | SLC35F5 | mRNA Transcript | NM_001330315.1 |
| | | Variant 4 | |
| SEQ ID NO. 139 | SLC35F5 | non-coding RNA | NR_104470.2 |
| | | Transcript Variant 2 | |
| SEQ ID NO. 140 | CNTNAP2 | mRNA | NM_014141.5 |
| SEQ ID NO. 141 | CNTNAP2 | mRNA Transcript | XM_017011950.1 |
| | | Variant X1 | |
| SEQ ID NO. 142 | PIGO | mRNA Transcript | NM_032634.3 |
| | | Variant 1 | |
| SEQ ID NO. 143 | PIGO | mRNA Transcript | NM_152850.3 |
| | | Variant 2 | |
| SEQ ID NO. 144 | PIGO | mRNA Transcript | NM_001201484.1 |
| | | Variant 3 | |
| SEQ ID NO. 145 | PIGO | mRNA Transcript | XM_005251619.3 |
| | | Variant X1 | |
| SEQ ID NO. 146 | PIGO | mRNA Transcript | XM_017015222.1 |
| | | Variant X2 | |
| SEQ ID NO. 147 | PIGO | misc RNA Transcript | XR_242515.2 |
| | | Variant X3 | |
| SEQ ID NO. 148 | PIGO | misc RNA Transcript | XR_001746390.1 |
| | | Variant X4 | |
| SEQ ID NO. 149 | PIGO | mRNA Transcript | XM_017015223.1 |
| | | Variant X5 | |
| SEQ ID NO. 150 | PIGO | mRNA Transcript | XM_017015224.1 |
| | | Variant X6 | |
| SEQ ID NO. 151 | PIGO | misc RNA Transcript | XR_001746391.1 |
| | | Variant X7 | |
| SEQ ID NO. 152 | SHH | mRNA Transcript | NM_000193.3 |
| | | Variant 1 | |
| SEQ ID NO. 153 | SHH | mRNA Transcript | NM_001310462.1 |
| | | Variant 2 | |
| SEQ ID NO. 154 | SHH | non-coding RNA | NR_132318.1 |
| | | Transcript Variant 3 | |
| SEQ ID NO. 155 | SHH | non-coding RNA | NR_132319.1 |
| | | Transcript Variant 4 | |
| SEQ ID NO. 156 | SHH | mRNA Transcript | XM_011516479.2 |
| | | Variant X1 | |
| SEQ ID NO. 157 | SHH | mRNA Transcript | XM_011516480.2 |
| | | Variant X2 | |
| SEQ ID NO. 158 | AQP11 | mRNA | NM_173039.2 |
| SEQ ID NO. 159 | AQP11 | mRNA Transcript | XM_005273917.4 |
| | | Variant X1 | |
| SEQ ID NO. 160 | PCDHB9 | mRNA | NM_019119.4 |
| SEQ ID NO. 161 | RHOA | mRNA Transcript | NM_001664.3 |
| | | Variant 1 | |
| SEQ ID NO. 162 | RHOA | mRNA Transcript | NM_001313941.1 |
| | | Variant 2 | |
| SEQ ID NO. 163 | RHOA | mRNA Transcript | NM_001313943.1 |
| | | Variant 3 | |
| SEQ ID NO. 164 | RHOA | mRNA Transcript | NM_001313944.1 |
| | | Variant 4 | |
| SEQ ID NO. 165 | RHOA | mRNA Transcript | NM_001313945.1 |
| | | Variant 5 | |
| SEQ ID NO. 166 | RHOA | mRNA Transcript | NM_001313946.1 |
| | | Variant 6 | |
| SEQ ID NO. 167 | RHOA | mRNA Transcript | NM_001313947.1 |
| | | Variant 7 | |
| SEQ ID NO. 168 | TMEM231 | mRNA Transcript | NM_001077416.2 |
| | | Variant 1 | |
| SEQ ID NO. 169 | TMEM231 | non-coding RNA | NR_074083.1 |
| | | Transcript Variant 5 | |
| SEQ ID NO. 170 | TMEM231 | mRNA Transcript | NM_001077418.2 |
| | | Variant 2 | |
| SEQ ID NO. 171 | SAMD8 | mRNA Transcript | NM_144660.2 |
| | | Variant 2 | |
| SEQ ID NO. 172 | SAMD8 | mRNA Transcript | NM_001174156.1 |
| | | Variant 1 | |
| SEQ ID NO. 173 | SAMD8 | mRNA Transcript | XM_011539311.1 |
| | | Variant X1 | |
| SEQ ID NO. 174 | SAMD8 | mRNA Transcript | XM_017015738.1 |
| | | Variant X2 | |
| SEQ ID NO. 175 | SAMD8 | mRNA Transcript | XM_005269541.4 |
| | | Variant X3 | |
| SEQ ID NO. 176 | SAMD8 | mRNA Transcript | XM_017015739.1 |
| | | Variant X4 | |
| SEQ ID NO. 177 | SAMD8 | mRNA Transcript | XM_011539312.2 |
| | | Variant X5 | |
| SEQ ID NO. 178 | SAMD8 | misc RNA Transcript | XR_001747026.1 |
| | | Variant X6 | |
| SEQ ID NO. 179 | ABCA13 | mRNA | NM_152701.4 |
| SEQ ID NO. 180 | ABCA13 | mRNA Transcript | XM_011515130.2 |
| | | Variant X1 | |
| SEQ ID NO. 181 | ABCA13 | mRNA Transcript | XM_011515131.2 |
| | | Variant X2 | |
| SEQ ID NO. 182 | ABCA13 | mRNA Transcript | XM_011515132.2 |
| | | Variant X3 | |
| SEQ ID NO. 183 | ABCA13 | mRNA Transcript | XM_011515133.2 |
| | | Variant X4 | |
| SEQ ID NO. 184 | ABCA13 | misc RNA Transcript | XR_926914.2 |
| | | Variant X5 | |
| SEQ ID NO. 185 | ABCA13 | misc RNA Transcript | XR_001744555.1 |
| | | Variant X6 | |
| SEQ ID NO. 186 | ABCA13 | misc RNA Transcript | XR_926915.2 |
| | | Variant X7 | |
| SEQ ID NO. 187 | ABCA13 | mRNA Transcript | XM_011515134.2 |
| | | Variant X8 | |
| SEQ ID NO. 188 | ABCA13 | mRNA Transcript | XM_011515136.2 |
| | | Variant X9 | |
| SEQ ID NO. 189 | ABCA13 | misc RNA Transcript | XR_926916.2 |
| | | Variant X10 | |
| SEQ ID NO. 190 | ABCA13 | mRNA Transcript | XM_011515137.2 |
| | | Variant X11 | |
| SEQ ID NO. 191 | ABCA13 | misc RNA Transcript | XR_926919.2 |
| | | Variant X12 | |
| SEQ ID NO. 192 | ABCA13 | mRNA Transcript | XM_011515138.2 |
| | | Variant X13 | |
| SEQ ID NO. 193 | ABCA13 | mRNA Transcript | XM_011515139.2 |
| | | Variant X14 | |
| SEQ ID NO. 194 | ABCA13 | mRNA Transcript | XM_017011767.1 |
| | | Variant X15 | |
| SEQ ID NO. 195 | ABCA13 | mRNA Transcript | XM_017011768.1 |
| | | Variant X16 | |
| SEQ ID NO. 196 | ABCA13 | mRNA Transcript | XM_011515141.2 |
| | | Variant X17 | |
| SEQ ID NO. 197 | ABCA13 | mRNA Transcript | XM_011515142.2 |
| | | Variant X18 | |
| SEQ ID NO. 198 | ABCA13 | mRNA Transcript | XM_011515143.2 |
| | | Variant X19 | |
| SEQ ID NO. 199 | ABCA13 | mRNA Transcript | XM_011515144.2 |
| | | Variant X20 | |
| SEQ ID NO. 200 | ABCA13 | mRNA Transcript | XM_011515145.2 |
| | | Variant X21 | |
| SEQ ID NO. 201 | ABCA13 | mRNA Transcript | XM_011515146.2 |
| | | Variant X22 | |
| SEQ ID NO. 202 | ABCA13 | mRNA Transcript | XM_011515147.2 |
| | | Variant X23 | |
| SEQ ID NO. 203 | ABCA13 | mRNA Transcript | XM_011515148.2 |
| | | Variant X24 | |
| SEQ ID NO. 204 | ABCA13 | mRNA Transcript | XM_011515149.2 |
| | | Variant X25 | |
| SEQ ID NO. 205 | ABCA13 | mRNA Transcript | XM_017011769.1 |
| | | Variant X26 | |
| SEQ ID NO. 206 | TAPT1 | mRNA | NM_153365.2 |
| SEQ ID NO. 207 | TAPT1 | mRNA Transcript | XM_011513812.2 |
| | | Variant X1 | |
| SEQ ID NO. 208 | TAPT1 | mRNA Transcript | XM_005248139.2 |
| | | Variant X2 | |
| SEQ ID NO. 209 | TAPT1 | mRNA Transcript | XM_005248140.3 |
| | | Variant X3 | |
| SEQ ID NO. 210 | TAPT1 | mRNA Transcript | XM_011513815.2 |
| | | Variant X4 | |
| SEQ ID NO. 211 | TAPT1 | mRNA Transcript | XM_017007876.1 |
| | | Variant X5 | |
| SEQ ID NO. 212 | TAPT1 | misc RNA Transcript | XR_241676.3 |
| | | Variant X6 | |
| SEQ ID NO. 213 | TAPT1 | misc RNA Transcript | XR_925318.2 |
| | | Variant X7 | |
| SEQ ID NO. 214 | TAPT1 | mRNA Transcript | XM_011513816.2 |
| | | Variant X8 | |
| SEQ ID NO. 215 | TAPT1 | mRNA Transcript | XM_011513817.2 |
| | | Variant X9 | |
| SEQ ID NO. 216 | NFASC | mRNA Transcript | NM_001005389.1 |
| | | Variant 5 | |
| SEQ ID NO. 217 | NFASC | mRNA Transcript | NM_015090.3 |
| | | Variant 4 | |
| SEQ ID NO. 218 | NFASC | mRNA Transcript | NM_001005388.2 |
| | | Variant 1 | |
| SEQ ID NO. 219 | NFASC | mRNA Transcript | NM_001160331.1 |
| | | Variant 2 | |
| SEQ ID NO. 220 | NFASC | mRNA Transcript | NM_001160332.1 |
| | | Variant 3 | |
| SEQ ID NO. 221 | NFASC | mRNA Transcript | NM_001160333.1 |
| | | Variant 6 | |
| SEQ ID NO. 222 | NFASC | mRNA Transcript | XM_011509311.1 |
| | | Variant X1 | |
| SEQ ID NO. 223 | NFASC | mRNA Transcript | XM_011509312.1 |
| | | Variant X2 | |
| SEQ ID NO. 224 | NFASC | mRNA Transcript | XM_011509313.1 |
| | | Variant X3 | |
| SEQ ID NO. 225 | NFASC | mRNA Transcript | XM_011509314.1 |
| | | Variant X5 | |
| SEQ ID NO. 226 | NFASC | mRNA Transcript | XM_011509315.1 |
| | | Variant X6 | |
| SEQ ID NO. 227 | NFASC | mRNA Transcript | XM_011509316.1 |
| | | Variant X8 | |
| SEQ ID NO. 228 | NFASC | mRNA Transcript | XM_011509317.1 |
| | | Variant X9 | |
| SEQ ID NO. 229 | NFASC | mRNA Transcript | XM_011509319.1 |
| | | Variant X11 | |
| SEQ ID NO. 230 | NFASC | mRNA Transcript | XM_011509321.1 |
| | | Variant X13 | |
| SEQ ID NO. 231 | NFASC | mRNA Transcript | XM_011509322.1 |
| | | Variant X15 | |
| SEQ ID NO. 232 | NFASC | mRNA Transcript | XM_011509323.1 |
| | | Variant X16 | |
| SEQ ID NO. 233 | NFASC | mRNA Transcript | XM_011509324.1 |
| | | Variant X17 | |
| SEQ ID NO. 234 | NFASC | mRNA Transcript | XM_011509325.1 |
| | | Variant X18 | |
| SEQ ID NO. 235 | NFASC | mRNA Transcript | XM_005244989.3 |
| | | Variant X19 | |
| SEQ ID NO. 236 | NFASC | mRNA Transcript | XM_005244991.3 |
| | | Variant X21 | |
| SEQ ID NO. 237 | NFASC | mRNA Transcript | XM_005244993.3 |
| | | Variant X23 | |
| SEQ ID NO. 238 | NFASC | mRNA Transcript | XM_011509326.1 |
| | | Variant X28 | |
| SEQ ID NO. 239 | NFASC | mRNA Transcript | XM_011509327.1 |
| | | Variant X29 | |
| SEQ ID NO. 240 | NFASC | mRNA Transcript | XM_005244997.3 |
| | | Variant X33 | |
| SEQ ID NO. 241 | NFASC | mRNA Transcript | XM_011509328.1 |
| | | Variant X35 | |
| SEQ ID NO. 242 | NFASC | mRNA Transcript | XM_017000733.1 |
| | | Variant X4 | |
| SEQ ID NO. 243 | NFASC | mRNA Transcript | XM_017000734.1 |
| | | Variant X7 | |
| SEQ ID NO. 244 | NFASC | mRNA Transcript | XM_011509318.2 |
| | | Variant X10 | |
| SEQ ID NO. 245 | NFASC | mRNA Transcript | XM_011509320.2 |
| | | Variant X12 | |
| SEQ ID NO. 246 | NFASC | mRNA Transcript | XM_017000735.1 |
| | | Variant X14 | |
| SEQ ID NO. 247 | NFASC | mRNA Transcript | XM_017000736.1 |
| | | Variant X20 | |
| SEQ ID NO. 248 | NFASC | mRNA Transcript | XM_005244992.4 |
| | | Variant X22 | |
| SEQ ID NO. 249 | NFASC | mRNA Transcript | XM_017000737.1 |
| | | Variant X24 | |
| SEQ ID NO. 250 | NFASC | misc RNA Transcript | XR_921759.2 |
| | | Variant X25 | |
| SEQ ID NO. 251 | NFASC | mRNA Transcript | XM_017000738.1 |
| | | Variant X26 | |
| SEQ ID NO. 252 | NFASC | mRNA Transcript | XM_017000739.1 |
| | | Variant X27 | |
| SEQ ID NO. 253 | NFASC | mRNA Transcript | XM_017000740.1 |
| | | Variant X30 | |
| SEQ ID NO. 254 | NFASC | mRNA Transcript | XM_017000741.1 |
| | | Variant X31 | |
| SEQ ID NO. 255 | NFASC | mRNA Transcript | XM_017000742.1 |
| | | Variant X32 | |
| SEQ ID NO. 256 | NFASC | mRNA Transcript | XM_017000743.1 |
| | | Variant X34 | |
| SEQ ID NO. 257 | LEPROT | mRNA Transcript | NM_001198681.1 |
| | | Variant 2 | |
| SEQ ID NO. 258 | LEPROT | mRNA Transcript | NM_017526.4 |
| | | Variant 1 | |
| SEQ ID NO. 259 | LEPROT | mRNA Transcript | NM_001198683.1 |
| | | Variant 3 | |
| SEQ ID NO. 260 | MCOLN2 | mRNA Transcript | NM_153259.3 |
| | | Variant 1 | |
| SEQ ID NO. 261 | MCOLN2 | mRNA Transcript | XM_011541187.2 |
| | | Variant X2 | |
| SEQ ID NO. 262 | MCOLN2 | mRNA Transcript | XM_011541188.2 |
| | | Variant X3 | |
| SEQ ID NO. 263 | MCOLN2 | misc RNA Transcript | XR_001737090.1 |
| | | Variant X4 | |
| SEQ ID NO. 264 | MCOLN2 | mRNA Transcript | XM_005270719.3 |
| | | Variant X5 | |
| SEQ ID NO. 265 | MCOLN2 | misc RNA Transcript | XR_001737091.1 |
| | | Variant X6 | |
| SEQ ID NO. 266 | MCOLN2 | mRNA Transcript | XM_017000923.1 |
| | | Variant X7 | |
| SEQ ID NO. 267 | MCOLN2 | mRNA Transcript | NM_001330647.1 |
| | | Variant 2 | |
| SEQ ID NO. 268 | IL6ST | mRNA Transcript | NM_002184.3 |
| | | Variant 1 | |
| SEQ ID NO. 269 | IL6ST | mRNA Transcript | NM_175767.2 |
| | | Variant 2 | |
| SEQ ID NO. 270 | IL6ST | mRNA Transcript | NM_001190981.1 |
| | | Variant 3 | |
| SEQ ID NO. 271 | IL6ST | non-coding RNA | NR_120480.1 |
| | | Transcript Variant 4 | |
| SEQ ID NO. 272 | IL6ST | misc RNA Transcript | XR_001742062.1 |
| | | Variant X1 | |
| SEQ ID NO. 273 | IL6ST | mRNA Transcript | XM_017009441.1 |
| | | Variant X2 | |
| SEQ ID NO. 274 | IL6ST | mRNA Transcript | XM_017009442.1 |
| | | Variant X3 | |
| SEQ ID NO. 275 | EMP3 | mRNA Transcript | NM_001425.2 |
| | | Variant 1 | |
| SEQ ID NO. 276 | EMP3 | mRNA Transcript | NM_001313905.1 |
| | | Variant 2 | |
| SEQ ID NO. 277 | EMP3 | mRNA Transcript | XM_011526605.2 |
| | | Variant X1 | |
| SEQ ID NO. 278 | CD83 | mRNA Transcript | NM_004233.3 |
| | | Variant 1 | |
| SEQ ID NO. 279 | CD83 | mRNA Transcript | NM_001040280.1 |
| | | Variant 2 | |
| SEQ ID NO. 280 | CD83 | mRNA Transcript | NM_001251901.1 |
| | | Variant 3 | |
| SEQ ID NO. 281 | LPAR6 | mRNA Transcript | NM_005767.5 |
| | | Variant 1 | |
| SEQ ID NO. 282 | LPAR6 | mRNA Transcript | NM_001162497.1 |
| | | Variant 2 | |
| SEQ ID NO. 283 | LPAR6 | mRNA Transcript | NM_001162498.1 |
| | | Variant 3 | |
| SEQ ID NO. 284 | PIEZO2 | mRNA | NM_022068.3 |
| SEQ ID NO. 285 | PIEZO2 | mRNA Transcript | XM_011525723.2 |
| | | Variant X1 | |
| SEQ ID NO. 286 | PIEZO2 | mRNA Transcript | XM_017025918.1 |
| | | Variant X2 | |
| SEQ ID NO. 287 | PIEZO2 | mRNA Transcript | XM_011525724.2 |
| | | Variant X3 | |
| SEQ ID NO. 288 | PIEZO2 | mRNA Transcript | XM_011525725.2 |
| | | Variant X4 | |
| SEQ ID NO. 289 | PIEZO2 | mRNA Transcript | XM_011525726.2 |
| | | Variant X5 | |
| SEQ ID NO. 290 | PIEZO2 | misc RNA Transcript | XR_001753259.1 |
| | | Variant X6 | |
| SEQ ID NO. 291 | DERL1 | mRNA Transcript | NM_024295.5 |
| | | Variant 1 | |
| SEQ ID NO. 292 | DERL1 | mRNA Transcript | NM_001134671.2 |
| | | Variant 2 | |
| SEQ ID NO. 293 | DERL1 | mRNA Transcript | XM_006716657.1 |
| | | Variant X2 | |
| SEQ ID NO. 294 | DERL1 | mRNA Transcript | NM_001330601.1 |
| | | Variant 3 | |
| SEQ ID NO. 295 | IL1RAP | mRNA Transcript | NM_002182.3 |
| | | Variant 1 | |
| SEQ ID NO. 296 | IL1RAP | mRNA Transcript | NM_134470.3 |
| | | Variant 2 | |
| SEQ ID NO. 297 | IL1RAP | mRNA Transcript | NM_001167928.1 |
| | | Variant 3 | |
| SEQ ID NO. 298 | IL1RAP | mRNA Transcript | NM_001167929.1 |
| | | Variant 4 | |
| SEQ ID NO. 299 | IL1RAP | mRNA Transcript | NM_001167930.1 |
| | | Variant 5 | |
| SEQ ID NO. 300 | IL1RAP | mRNA Transcript | NM_001167931.1 |
| | | Variant 6 | |
| SEQ ID NO. 301 | IL1RAP | mRNA Transcript | XM_017006347.1 |
| | | Variant X1 | |
| SEQ ID NO. 302 | IL1RAP | mRNA Transcript | XM_017006348.1 |
| | | Variant X2 | |
| SEQ ID NO. 303 | LPAR4 | mRNA Transcript | NM_005296.2 |
| | | Variant 2 | |
| SEQ ID NO. 304 | LPAR4 | mRNA Transcript | NM_001278000.1 |
| | | Variant 1 | |
| SEQ ID NO. 305 | LPAR4 | mRNA Transcript | XM_017029437.1 |
| | | Variant X1 | |
| SEQ ID NO. 306 | LPAR4 | mRNA Transcript | XM_005262126.3 |
| | | Variant X2 | |
| SEQ ID NO. 307 | LPAR4 | mRNA Transcript | XM_006724639.3 |
| | | Variant X3 | |
| SEQ ID NO. 308 | LPAR4 | mRNA Transcript | XM_017029438.1 |
| | | Variant X4 | |
| SEQ ID NO. 309 | SERPINE2 | mRNA Transcript | NM_006216.3 |
| | | Variant 1 | |
| SEQ ID NO. 310 | SERPINE2 | mRNA Transcript | NM_001136528.1 |
| | | Variant 2 | |
| SEQ ID NO. 311 | SERPINE2 | mRNA Transcript | NM_001136530.1 |
| | | Variant 4 | |
| SEQ ID NO. 312 | SERPINE2 | non-coding RNA | NR_073116.1 |
| | | Transcript Variant 3 | |
| SEQ ID NO. 313 | SERPINE2 | mRNA Transcript | XM_005246641.2 |
| | | Variant X1 | |
| SEQ ID NO. 314 | SERPINE2 | mRNA Transcript | XM_017004329.1 |
| | | Variant X2 | |
| SEQ ID NO. 315 | SERPINE2 | mRNA Transcript | XM_017004330.1 |
| | | Variant X3 | |
| SEQ ID NO. 316 | SERPINE2 | mRNA Transcript | XM_017004331.1 |
| | | Variant X4 | |
| SEQ ID NO. 317 | SERPINE2 | mRNA Transcript | XM_017004332.1 |
| | | Variant X5 | |
| SEQ ID NO. 318 | PKN2 | mRNA Transcript | NM_006256.3 |
| | | Variant 1 | |
| SEQ ID NO. 319 | PKN2 | mRNA Transcript | NM_001320709.1 |
| | | Variant 4 | |
| SEQ ID NO. 320 | PKN2 | mRNA Transcript | NM_001320707.1 |
| | | Variant 2 | |
| SEQ ID NO. 321 | PKN2 | mRNA Transcript | NM_001320708.1 |
| | | Variant 3 | |
| SEQ ID NO. 322 | PKN2 | mRNA Transcript | XM_017001782.1 |
| | | Variant X1 | |
| SEQ ID NO. 323 | PKN2 | mRNA Transcript | XM_017001783.1 |
| | | Variant X2 | |
| SEQ ID NO. 324 | PKN2 | mRNA Transcript | XM_011541772.2 |
| | | Variant X3 | |
| SEQ ID NO. 325 | VAMP2 | mRNA Transcript | NM_014232.2 |
| | | Variant 1 | |
| SEQ ID NO. 326 | VAMP2 | mRNA Transcript | NM_001330125.1 |
| | | Variant 2 | |
| SEQ ID NO. 327 | TMCO3 | mRNA Transcript | XM_006719969.1 |
| | | Variant X2 | |
| SEQ ID NO. 328 | TMCO3 | mRNA Transcript | XM_011537498.2 |
| | | Variant X1 | |
| SEQ ID NO. 329 | TMCO3 | mRNA Transcript | XM_017020630.1 |
| | | Variant X4 | |
| SEQ ID NO. 330 | TMCO3 | mRNA Transcript | XM_011537501.2 |
| | | Variant X8 | |
| SEQ ID NO. 331 | TMCO3 | mRNA Transcript | XM_011537502.2 |
| | | Variant X9 | |
| SEQ ID NO. 332 | TMCO3 | misc RNA Transcript | XR_001749587.1 |
| | | Variant X10 | |
| SEQ ID NO. 333 | TMCO3 | mRNA Transcript | XM_017020634.1 |
| | | Variant X11 | |
| SEQ ID NO. 334 | TMCO3 | mRNA Transcript | XM_011537504.2 |
| | | Variant X15 | |
| SEQ ID NO. 335 | TMCO3 | mRNA Transcript | XM_017020636.1 |
| | | Variant X16 | |
| SEQ ID NO. 336 | TMCO3 | misc RNA Transcript | XR_001749590.1 |
| | | Variant X17 | |
| SEQ ID NO. 337 | TMCO3 | mRNA Transcript | XM_011537506.2 |
| | | Variant X18 | |
| SEQ ID NO. 338 | TMCO3 | mRNA Transcript | XM_011537507.2 |
| | | Variant X19 | |
| SEQ ID NO. 339 | TMCO3 | misc RNA Transcript | XR_944279.2 |
| | | Variant X20 | |
| SEQ ID NO. 340 | TMCO3 | misc RNA Transcript | XR_001749591.1 |
| | | Variant X21 | |
| SEQ ID NO. 341 | TMCO3 | mRNA Transcript | XM_011537509.2 |
| | | Variant X22 | |
| SEQ ID NO. 342 | TMCO3 | mRNA Transcript | NM_001349745.1 |
| | | Variant 6 | |
| SEQ ID NO. 343 | TMCO3 | mRNA Transcript | NM_001349743.1 |
| | | Variant 4 | |
| SEQ ID NO. 344 | TMCO3 | mRNA Transcript | NM_001349741.1 |
| | | Variant 2 | |
| SEQ ID NO. 345 | TMCO3 | mRNA Transcript | NM_001349746.1 |
| | | Variant 7 | |
| SEQ ID NO. 346 | TMCO3 | mRNA Transcript | NM_001349744.1 |
| | | Variant 5 | |
| SEQ ID NO. 347 | TMCO3 | mRNA Transcript | NM_001349742.1 |
| | | Variant 3 | |
| SEQ ID NO. 348 | TMCO3 | mRNA Transcript | NM_017905.5 |
| | | Variant 1 | |
| SEQ ID NO. 349 | TMCO3 | non-coding RNA | NR_146221.1 |
| | | Transcript Variant 8 | |
| SEQ ID NO. 350 | TMCO3 | non-coding RNA | NR_146222.1 |
| | | Transcript Variant 9 | |
| SEQ ID NO. 351 | VAMP7 | mRNA Transcript | NM_001145149.2 |
| | | Variant 2 | |
| SEQ ID NO. 352 | VAMP7 | mRNA Transcript | NM_005638.5 |
| | | Variant 1 | |
| SEQ ID NO. 353 | VAMP7 | mRNA Transcript | NM_001185183.1 |
| | | Variant 3 | |
| SEQ ID NO. 354 | VAMP7 | non-coding RNA | NR_033714.1 |
| | | Transcript Variant 4 | |
| SEQ ID NO. 355 | VAMP7 | non-coding RNA | NR_033715.1 |
| | | Transcript Variant 5 | |
| SEQ ID NO. 356 | VAMP7 | mRNA Transcript | XM_011531188.1 |
| | | Variant X1 | |
| SEQ ID NO. 357 | V.AMP7 | mRNA Transcript | XM_011545653.1 |
| | | Variant X1 | |
| SEQ ID NO. 358 | V.AMP7 | mRNA Transcript | XM_017029760.1 |
| | | Variant X2 | |
| SEQ ID NO. 359 | V.AMP7 | mRNA Transcript | XM_017030063.1 |
| | | Variant X2 | |
| SEQ ID NO. 360 | PTPRC | mRNA Transcript | NM_001267798.1 |
| | | Variant 5 | |
| SEQ ID NO. 361 | PTPRC | mRNA Transcript | NM_002838.4 |
| | | Variant 1 | |
| SEQ ID NO. 362 | PTPRC | mRNA Transcript | NM_080921.3 |
| | | Variant 2 | |
| SEQ ID NO. 363 | PTPRC | non-coding RNA | NR_052021.1 |
| | | Transcript Variant 4 | |
| SEQ ID NO. 364 | PTPRC | mRNA Transcript | XM_006711472.3 |
| | | Variant X1 | |
| SEQ ID NO. 365 | PTPRC | mRNA Transcript | XM_006711473.3 |
| | | Variant X2 | |
| SEQ ID NO. 366 | PTPRC | mRNA Transcript | XM_006711474.3 |
| | | Variant X3 | |
| SEQ ID NO. 367 | TFRC | mRNA Transcript | NM_001128148.2 |
| | | Variant 2 | |
| SEQ ID NO. 368 | TFRC | mRNA Transcript | NM_003234.3 |
| | | Variant 1 | |
| SEQ ID NO. 369 | TFRC | mRNA Transcript | NM_001313965.1 |
| | | Variant 3 | |
| SEQ ID NO. 370 | TFRC | mRNA Transcript | NM_001313966.1 |
| | | Variant 4 | |
| SEQ ID NO. 371 | ILDR1 | mRNA Transcript | NM_175924.3 |
| | | Variant 2 | |
| SEQ ID NO. 372 | ILDR1 | mRNA Transcript | NM_001199799.1 |
| | | Variant 1 | |
| SEQ ID NO. 373 | ILDR1 | mRNA Transcript | NM_001199800.1 |
| | | Variant 3 | |
| SEQ ID NO. 374 | ILDR1 | mRNA Transcript | XM_011512738.2 |
| | | Variant X1 | |
| SEQ ID NO. 375 | ILDR1 | mRNA Transcript | XM_005247389.4 |
| | | Variant X2 | |
| SEQ ID NO. 376 | ILDR1 | mRNA Transcript | XM_011512739.2 |
| | | Variant X3 | |
| SEQ ID NO. 377 | ILDR1 | cDNA Transcript | NM_001199799.1 |
| | | Variant 1 | |
| SEQ ID NO. 378 | ILDR1 | Amino Acid | NP_001186728.1 |
| | | Sequence Isoform 1 | |
| | | Precursor | |
| SEQ ID NO. 379 | ILDR1 | cDNA Transcript | NM_001199800.1 |
| | | Variant 3 | |
| SEQ ID NO. 380 | ILDR1 | Amino Acid | NP_001186729.1 |
| | | Sequence Isoform 3 | |
| | | Precursor | |
| SEQ ID NO. 381 | ILDR1 | cDNA Transcript | NM_175924.3 |
| | | Variant 2 | |
| SEQ ID NO. 382 | ILDR1 | Amino Acid | NP_787120.1 |
| | | Sequence Isoform 2 | |
| | | Precursor | |
| SEQ ID NO. 383 | PDIA3 | mRNA | NM_005313.4 |
| SEQ ID NO. 384 | AIMP1 | mRNA Transcript | NM_004757.3 |
| | | Variant 1 | |
| SEQ ID NO. 385 | AIMP1 | mRNA Transcript | NM_001142415.1 |
| | | Variant 2 | |
| SEQ ID NO. 386 | AIMP1 | mRNA Transcript | NM_001142416.1 |
| | | Variant 3 | |
| SEQ ID NO. 387 | AIMP1 | mRNA Transcript | XM_017008835.1 |
| | | Variant X1 | |
| SEQ ID NO. 388 | AIMP1 | mRNA Transcript | XM_017008836.1 |
| | | Variant X2 | |
| SEQ ID NO. 389 | GPR63 | mRNA Transcript | NM_030784.3 |
| | | Variant 2 | |
| SEQ ID NO. 390 | GPR63 | mRNA Transcript | NM_001143957.2 |
| | | Variant 1 | |
| SEQ ID NO. 391 | GPR63 | mRNA Transcript | XM_011536153.2 |
| | | Variant X1 | |
| SEQ ID NO. 392 | GPR63 | mRNA Transcript | XM_017011334.1 |
| | | Variant X2 | |
| SEQ ID NO. 393 | GPR63 | mRNA Transcript | XM_011536154.2 |
| | | Variant X3 | |
| SEQ ID NO. 394 | GPR63 | mRNA Transcript | XM_011536155.2 |
| | | Variant X4 | |
| SEQ ID NO. 395 | GPR63 | mRNA Transcript | XM_011536157.2 |
| | | Variant X5 | |
| SEQ ID NO. 396 | GPR63 | mRNA Transcript | XM_011536159.2 |
| | | Variant X6 | |
| SEQ ID NO. 397 | GPR63 | mRNA Transcript | XM_006715570.3 |
| | | Variant X7 | |
| SEQ ID NO. 398 | CCR7 | mRNA Transcript | NM_001838.3 |
| | | Variant 1 | |
| SEQ ID NO. 399 | CCR7 | mRNA Transcript | NM_001301714.1 |
| | | Variant 2 | |
| SEQ ID NO. 400 | CCR7 | mRNA Transcript | NM_001301716.1 |
| | | Variant 3 | |
| SEQ ID NO. 401 | CCR7 | mRNA Transcript | NM_001301717.1 |
| | | Variant 4 | |
| SEQ ID NO. 402 | CCR7 | mRNA Transcript | NM_001301718.1 |
| | | Variant 5 | |
| SEQ ID NO. 403 | ATG9B | non-coding RNA | NR_073169.1 |
| | | Transcript Variant 2 | |
| SEQ ID NO. 404 | ATG9B | mRNA Transcript | XM_011516065.1 |
| | | Variant X1 | |
| SEQ ID NO. 405 | ATG9B | mRNA Transcript | NM_001317056.1 |
| | | Variant 3 | |
| SEQ ID NO. 406 | ATG9B | non-coding RNA | NR_133652.1 |
| | | Transcript Variant 1 | |
| SEQ ID NO. 407 | ATG9B | mRNA Transcript | XM_011516066.2 |
| | | Variant X2 | |
| SEQ ID NO. 408 | SLC9B1 | mRNA Transcript | NM_139173.3 |
| | | Variant 1 | |
| SEQ ID NO. 409 | SLC9B1 | mRNA Transcript | NM_001100874.2 |
| | | Variant 2 | |
| SEQ ID NO. 410 | SLC9B1 | non-coding RNA | NR_047513.1 |
| | | Transcript Variant 3 | |
| SEQ ID NO. 411 | SLC9B1 | non-coding RNA | NR_047515.1 |
| | | Transcript Variant 4 | |
| SEQ ID NO. 412 | SLC9B1 | mRNA Transcript | XM_011531622.1 |
| | | Variant X2 | |
| SEQ ID NO. 413 | SLC9B1 | mRNA Transcript | XM_011531623.1 |
| | | Variant X3 | |
| SEQ ID NO. 414 | SLC9B1 | mRNA Transcript | XM_006714093.3 |
| | | Variant X1 | |
| SEQ ID NO. 415 | CD99 | mRNA Transcript | NM_002414.4 |
| | | Variant 1 | |
| SEQ ID NO. 416 | CD99 | mRNA Transcript | NM_001122898.2 |
| | | Variant 2 | |
| SEQ ID NO. 417 | CD99 | mRNA Transcript | NM_001321367.1 |
| | | Variant 4 | |
| SEQ ID NO. 418 | CD99 | mRNA Transcript | NM_001321368.1 |
| | | Variant 5 | |
| SEQ ID NO. 419 | CD99 | mRNA Transcript | NM_001321369.1 |
| | | Variant 6 | |
| SEQ ID NO. 420 | CD99 | mRNA Transcript | NM_001321370.1 |
| | | Variant 7 | |
| SEQ ID NO. 421 | CD99 | non-coding RNA | NR_135623.1 |
| | | Transcript Variant 3 | |
| SEQ ID NO. 422 | LRP1 | mRNA | NM_002332.2 |
| SEQ ID NO. 423 | LRP1 | mRNA Transcript | XM_017019303.1 |
| | | Variant X1 | |
| SEQ ID NO. 424 | UBR4 | mRNA | NM_020765.2 |
| SEQ ID NO. 425 | UBR4 | mRNA Transcript | XM_011541108.2 |
| | | Variant X1 | |
| SEQ ID NO. 426 | UBR4 | mRNA Transcript | XM_011541109.2 |
| | | Variant X2 | |
| SEQ ID NO. 427 | UBR4 | mRNA Transcript | XM_011541110.2 |
| | | Variant X3 | |
| SEQ ID NO. 428 | UBR4 | mRNA Transcript | XM_011541111.2 |
| | | Variant X4 | |
| SEQ ID NO. 429 | UBR4 | mRNA Transcript | XM_011541112.2 |
| | | Variant X5 | |
| SEQ ID NO. 430 | UBR4 | mRNA Transcript | XM_011541113.2 |
| | | Variant X6 | |
| SEQ ID NO. 431 | UBR4 | mRNA Transcript | XM_011541114.2 |
| | | Variant X7 | |
| SEQ ID NO. 432 | UBR4 | mRNA Transcript | XM_017000822.1 |
| | | Variant X8 | |
| SEQ ID NO. 433 | UBR4 | mRNA Transcript | XM_011541115.2 |
| | | Variant X9 | |
| SEQ ID NO. 434 | UBR4 | mRNA Transcript | XM_011541116.2 |
| | | Variant X10 | |
| SEQ ID NO. 435 | UBR4 | mRNA Transcript | XM_017000823.1 |
| | | Variant X11 | |
| SEQ ID NO. 436 | UBR4 | mRNA Transcript | XM_011541117.2 |
| | | Variant X12 | |
| SEQ ID NO. 437 | UBR4 | mRNA Transcript | XM_011541118.2 |
| | | Variant X13 | |
| SEQ ID NO. 438 | UBR4 | mRNA Transcript | XM_017000824.1 |
| | | Variant X14 | |
| SEQ ID NO. 439 | UBR4 | mRNA Transcript | XM_017000825.1 |
| | | Variant X15 | |
| SEQ ID NO. 440 | UBR4 | mRNA Transcript | XM_017000826.1 |
| | | Variant X16 | |
| SEQ ID NO. 441 | UBR4 | mRNA Transcript | XM_011541119.2 |
| | | Variant X17 | |
| SEQ ID NO. 442 | UBR4 | mRNA Transcript | XM_011541120.2 |
| | | Variant X18 | |
| SEQ ID NO. 443 | UBR4 | mRNA Transcript | XM_017000827.1 |
| | | Variant X19 | |
| SEQ ID NO. 444 | UBR4 | mRNA Transcript | XM_011541121.2 |
| | | Variant X20 | |
| SEQ ID NO. 445 | UBR4 | mRNA Transcript | XM_017000828.1 |
| | | Variant X21 | |
| SEQ ID NO. 446 | UBR4 | mRNA Transcript | XM_017000829.1 |
| | | Variant X22 | |
| SEQ ID NO. 447 | UBR4 | mRNA Transcript | XM_017000830.1 |
| | | Variant X23 | |
| SEQ ID NO. 448 | ATP6AP2 | mRNA | NM_005765.2 |
| SEQ ID NO. 449 | TEX10 | mRNA Transcript | NM_017746.3 |
| | | Variant 1 | |
| SEQ ID NO. 450 | TEX10 | mRNA Transcript | NM_001161584.1 |
| | | Variant 2 | |
| SEQ ID NO. 451 | TEX10 | mRNA Transcript | XM_011518798.1 |
| | | Variant X1 | |
| SEQ ID NO. 452 | TEX10 | misc RNA Transcript | XR_929813.1 |
| | | Variant X2 | |
| SEQ ID NO. 453 | TEX10 | misc RNA Transcript | XR_001746327.1 |
| | | Variant X3 | |
| SEQ ID NO. 454 | TEX10 | mRNA Transcript | XM_017014848.1 |
| | | Variant X4 | |
| SEQ ID NO. 455 | CNGB1 | mRNA Transcript | NM_001297.4 |
| | | Variant 1 | |
| SEQ ID NO. 456 | CNGB1 | mRNA Transcript | NM_001135639.1 |
| | | Variant 2 | |
| SEQ ID NO. 457 | CNGB1 | mRNA Transcript | NM_001286130.1 |
| | | Variant 3 | |
| SEQ ID NO. 458 | CNGB1 | mRNA Transcript | XM_011522870.2 |
| | | Variant X1 | |
| SEQ ID NO. 459 | SPN | mRNA Transcript | NM_001030288.3 |
| | | Variant 1 | |
| SEQ ID NO. 460 | SPN | mRNA Transcript | NM_003123.5 |
| | | Variant 2 | |
| SEQ ID NO. 461 | PILRB | mRNA | NM_178238.3 |
| SEQ ID NO. 462 | JAM2 | mRNA Transcript | NM_021219.3 |
| | | Variant 1 | |
| SEQ ID NO. 463 | JAM2 | mRNA Transcript | NM_001270407.1 |
| | | Variant 2 | |
| SEQ ID NO. 464 | JAM2 | mRNA Transcript | NM_001270408.1 |
| | | Variant 3 | |
| SEQ ID NO. 465 | JAM2 | non-coding RNA | NR_072999.1 |
| | | Transcript Variant 4 | |
| SEQ ID NO. 466 | JAM2 | misc RNA Transcript | XR_937537.2 |
| | | Variant X1 | |
| SEQ ID NO. 467 | PDGFA | mRNA Transcript | NM_002607.5 |
| | | Variant 1 | |
| SEQ ID NO. 468 | PDGFA | mRNA Transcript | NM_033023.4 |
| | | Variant 2 | |
| SEQ ID NO. 469 | PDGFA | mRNA Transcript | XM_011515415.1 |
| | | Variant X1 | |
| SEQ ID NO. 470 | PDGFA | mRNA Transcript | XM_011515416.1 |
| | | Variant X2 | |
| SEQ ID NO. 471 | PDGFA | mRNA Transcript | XM_011515417.1 |
| | | Variant X3 | |
| SEQ ID NO. 472 | PDGFA | mRNA Transcript | XM_011515418.1 |
| | | Variant X4 | |
| SEQ ID NO. 473 | PDGFA | mRNA Transcript | XM_017012289.1 |
| | | Variant X5 | |
| SEQ ID NO. 474 | PDGFA | mRNA Transcript | XM_011515419.2 |
| | | Variant X6 | |
| SEQ ID NO. 475 | CD46 | mRNA Transcript | NM_002389.4 |
| | | Variant a | |
| SEQ ID NO. 476 | CD46 | mRNA Transcript | NM_172359.2 |
| | | Variant b | |
| SEQ ID NO. 477 | CD46 | mRNA Transcript | NM_172351.2 |
| | | Variant c | |
| SEQ ID NO. 478 | CD46 | mRNA Transcript | NM_153826.3 |
| | | Variant d | |
| SEQ ID NO. 479 | CD46 | mRNA Transcript | NM_172352.2 |
| | | Variant e | |
| SEQ ID NO. 480 | CD46 | mRNA Transcript | NM_172353.2 |
| | | Variant f | |
| SEQ ID NO. 481 | CD46 | mRNA Transcript | NM_172361.2 |
| | | Variant l | |
| SEQ ID NO. 482 | CD46 | mRNA Transcript | NM_172350.2 |
| | | Variant n | |
| SEQ ID NO. 483 | CD46 | mRNA Transcript | XM_011509563.1 |
| | | Variant X1 | |
| SEQ ID NO. 484 | CD46 | mRNA Transcript | XM_011509564.1 |
| | | Variant X3 | |
| SEQ ID NO. 485 | CD46 | mRNA Transcript | XM_017001308.1 |
| | | Variant X2 | |
| SEQ ID NO. 486 | CD46 | mRNA Transcript | XM_017001309.1 |
| | | Variant X4 | |
| SEQ ID NO. 487 | CD46 | mRNA Transcript | XM_017001310.1 |
| | | Variant X5 | |
| SEQ ID NO. 488 | CD46 | misc RNA Transcript | XR_001737177.1 |
| | | Variant X6 | |
| SEQ ID NO. 489 | CD46 | misc RNA Transcript | XR_001737178.1 |
| | | Variant X7 | |
| SEQ ID NO. 490 | NDUFB1 | mRNA | NM_004545.3 |
| SEQ ID NO. 491 | GYPE | mRNA Transcript | NM_198682.2 |
| | | Variant 2 | |
| SEQ ID NO. 492 | GYPE | mRNA Transcript | NM_002102.3 |
| | | Variant 1 | |
| SEQ ID NO. 493 | GYPE | mRNA Transcript | XM_017008139.1 |
| | | Variant X1 | |
| SEQ ID NO. 494 | GYPE | mRNA Transcript | XM_017008140.1 |
| | | Variant X2 | |
| SEQ ID NO. 495 | SLC12A8 | mRNA Transcript | NM_024628.5 |
| | | Variant 1 | |
| SEQ ID NO. 496 | SLC12A8 | mRNA Transcript | NM_001195483.1 |
| | | Variant 2 | |
| SEQ ID NO. 497 | SLC2A14 | mRNA Transcript | NM_001286234.1 |
| | | Variant 3 | |
| SEQ ID NO. 498 | SLC2A14 | mRNA Transcript | NM_001286233.1 |
| | | Variant 1 | |
| SEQ ID NO. 499 | SLC2A14 | mRNA Transcript | NM_001286236.1 |
| | | Variant 5 | |
| SEQ ID NO. 500 | SLC2A14 | mRNA Transcript | NM_001286235.1 |
| | | Variant 4 | |
| SEQ ID NO. 501 | SLC2A14 | mRNA Transcript | NM_153449.3 |
| | | Variant 2 | |
| SEQ ID NO. 502 | SLC2A14 | mRNA Transcript | NM_001286237.1 |
| | | Variant 6 | |
| SEQ ID NO. 503 | SLC2A14 | mRNA Transcript | XM_011520562.1 |
| | | Variant X6 | |
| SEQ ID NO. 504 | SLC2A14 | mRNA Transcript | XM_017018841.1 |
| | | Variant X1 | |
| SEQ ID NO. 505 | SLC2A14 | mRNA Transcript | XM_017018842.1 |
| | | Variant X2 | |
| SEQ ID NO. 506 | SLC2A14 | mRNA Transcript | XM_017018843.1 |
| | | Variant X3 | |
| SEQ ID NO. 507 | SLC2A14 | mRNA Transcript | XM_017018844.1 |
| | | Variant X4 | |
| SEQ ID NO. 508 | SLC2A14 | mRNA Transcript | XM_017018845.1 |
| | | Variant X5 | |
| SEQ ID NO. 509 | SLC2A14 | mRNA Transcript | XM_017018846.1 |
| | | Variant X7 | |
| SEQ ID NO. 510 | SLC2A14 | mRNA Transcript | XM_005253315.3 |
| | | Variant X8 | |
| SEQ ID NO. 511 | SLC2A14 | mRNA Transcript | XM_005253317.4 |
| | | Variant X9 | |
| SEQ ID NO. 512 | SLC2A14 | mRNA Transcript | XM_017018847.1 |
| | | Variant X10 | |
| SEQ ID NO. 513 | SLC2A14 | mRNA Transcript | XM_011520563.2 |
| | | Variant X11 | |
| SEQ ID NO. 514 | SLC2A14 | mRNA Transcript | XM_011520564.2 |
| | | Variant X12 | |
| SEQ ID NO. 515 | SLC2A14 | mRNA Transcript | XM_011520565.2 |
| | | Variant X13 | |
| SEQ ID NO. 516 | RNF19B | mRNA Transcript | NM_153341.3 |
| | | Variant 1 | |
| SEQ ID NO. 517 | RNF19B | mRNA Transcript | NM_001127361.2 |
| | | Variant 2 | |
| SEQ ID NO. 518 | RNF19B | mRNA Transcript | NM_001300826.1 |
| | | Variant 3 | |
| SEQ ID NO. 519 | RNF19B | mRNA Transcript | XM_006710356.2 |
| | | Variant X1 | |
| SEQ ID NO. 520 | RNF19B | mRNA Transcript | XM_006710357.3 |
| | | Variant X2 | |
| SEQ ID NO. 521 | RNF19B | mRNA Transcript | XM_006710358.3 |
| | | Variant X3 | |
| SEQ ID NO. 522 | SPCS1 | mRNA | NM_014041.3 |
| SEQ ID NO. 523 | SLC35F6 | mRNA | NM_017877.3 |
| SEQ ID NO. 524 | CD36 | mRNA Transcript | NM_001001548.2 |
| | | Variant 1 | |
| SEQ ID NO. 525 | CD36 | mRNA Transcript | NM_001001547.2 |
| | | Variant 2 | |
| SEQ ID NO. 526 | CD36 | mRNA Transcript | NM_000072.3 |
| | | Variant 3 | |
| SEQ ID NO. 527 | CD36 | mRNA Transcript | NM_001127443.1 |
| | | Variant 4 | |
| SEQ ID NO. 528 | CD36 | mRNA Transcript | NM_001127444.1 |
| | | Variant 5 | |
| SEQ ID NO. 529 | CD36 | mRNA Transcript | XM_005250713.1 |
| | | Variant X2 | |
| SEQ ID NO. 530 | CD36 | mRNA Transcript | XM_005250714.1 |
| | | Variant X3 | |
| SEQ ID NO. 531 | CD36 | mRNA Transcript | NM_001289908.1 |
| | | Variant 6 | |
| SEQ ID NO. 532 | CD36 | mRNA Transcript | NM_001289909.1 |
| | | Variant 7 | |
| SEQ ID NO. 533 | CD36 | mRNA Transcript | NM_001289911.1 |
| | | Variant 8 | |
| SEQ ID NO. 534 | CD36 | non-coding RNA | NR_110501.1 |
| | | Transcript Variant 9 | |
| SEQ ID NO. 535 | CD36 | mRNA Transcript | XM_005250715.4 |
| | | Variant X1 | |
| SEQ ID NO. 536 | ITM2B | mRNA | NM_021999.4 |
| SEQ ID NO. 537 | GLG1 | mRNA Transcript | NM_.012201.5 |
| | | Variant 1 | |
| SEQ ID NO. 538 | GLG1 | mRNA Transcript | NM_001145666.1 |
| | | Variant 2 | |
| SEQ ID NO. 539 | GLG1 | mRNA Transcript | NM_001145667.1 |
| | | Variant 3 | |
| SEQ ID NO. 540 | GLG1 | non-coding RNA | NR_027264.1 |
| | | Transcript Variant 4 | |
| SEQ ID NO. 541 | GLG1 | non-coding RNA | NR_027265.1 |
| | | Transcript Variant 5 | |
| SEQ ID NO. 542 | SMIM24 | mRNA | NM_001136503.1 |
| SEQ ID NO. 543 | TMEM50A | mRNA | NM_014313.3 |
| SEQ ID NO. 544 | TMEM50A | mRNA Transcript | XM_005245817.1 |
| | | Variant X2 | |
| SEQ ID NO. 545 | TMEM50A | mRNA Transcript | XM_011541159.1 |
| | | Variant X1 | |
| SEQ ID NO. 546 | HSPA5 | mRNA | NM_005347.4 |
| SEQ ID NO. 547 | ITGAX | mRNA Transcript | NM_001286375.1 |
| | | Variant 1 | |
| SEQ ID NO. 548 | ITGAX | mRNA Transcript | NM_000887.4 |
| | | Variant 2 | |
| SEQ ID NO. 549 | ITGAX | mRNA Transcript | XM_011545852.1 |
| | | Variant X2 | |
| SEQ ID NO. 550 | ITGAX | mRNA Transcript | XM_011545854.1 |
| | | Variant X3 | |
| SEQ ID NO. 551 | ITGAX | misc RNA Transcript | XR_950797.2 |
| | | Variant X1 | |
| SEQ ID NO. 552 | SLC24A2 | mRNA Transcript | NM_020344.3 |
| | | Variant 1 | |
| SEQ ID NO. 553 | SLC24A2 | mRNA Transcript | NM_001193288.2 |
| | | Variant 2 | |
| SEQ ID NO. 554 | SLC24A2 | mRNA Transcript | XM_005251426.4 |
| | | Variant X1 | |
| SEQ ID NO. 555 | SLC24A2 | mRNA Transcript | XM_005251425.2 |
| | | Variant X2 | |
| SEQ ID NO. 556 | SLC24A2 | mRNA Transcript | XM_017014592.1 |
| | | Variant X3 | |
| SEQ ID NO. 557 | SLC24A2 | mRNA Transcript | XM_006716750.3 |
| | | Variant X4 | |
| SEQ ID NO. 558 | SLC24A2 | mRNA Transcript | XM_017014593.1 |
| | | Variant X5 | |
| SEQ ID NO. 559 | SLC2A3 | mRNA | NM_006931.2 |
| SEQ ID NO. 560 | RAB11FIP3 | mRNA Transcript | NM_014700.3 |
| | | Variant 1 | |
| SEQ ID NO. 561 | RAB11FIP3 | mRNA Transcript | NM_001142272.1 |
| | | Variant 2 | |
| SEQ ID NO. 562 | RAB11FIP3 | mRNA Transcript | XM_005255714.1 |
| | | Variant X3 | |
| SEQ ID NO. 563 | RAB11FIP3 | mRNA Transcript | XM_005255713.3 |
| | | Variant X1 | |
| SEQ ID NO. 564 | RAB11FIP3 | mRNA Transcript | XM_017023907.1 |
| | | Variant X2 | |
| SEQ ID NO. 565 | RAB11FIP3 | mRNA Transcript | XM_005255715.4 |
| | | Variant X4 | |
| SEQ ID NO. 566 | RAB11FIP3 | mRNA Transcript | XM_011522764.2 |
| | | Variant X5 | |
| SEQ ID NO. 567 | RAB11FIP3 | mRNA Transcript | XM_005255717.3 |
| | | Variant X6 | |
| SEQ ID NO. 568 | RAB11FIP3 | mRNA Transcript | XM_011522765.2 |
| | | Variant X7 | |
| SEQ ID NO. 569 | RAB11FIP3 | mRNA Transcript | XM_005255718.3 |
| | | Variant X8 | |
| SEQ ID NO. 570 | RAB11FIP3 | misc RNA Transcript | XR_932981.2 |
| | | Variant X9 | |
| SEQ ID NO. 571 | IL18R1 | mRNA Transcript | NM_003855.3 |
| | | Variant 1 | |
| SEQ ID NO. 572 | IL18R1 | mRNA Transcript | NM_001282399.1 |
| | | Variant 2 | |
| SEQ ID NO. 573 | IL18R1 | mRNA Transcript | XM_005264039.3 |
| | | Variant X1 | |
| SEQ ID NO. 574 | IL18R1 | mRNA Transcript | XM_005264040.3 |
| | | Variant X2 | |
| SEQ ID NO. 575 | IL18R1 | mRNA Transcript | XM_011512099.1 |
| | | Variant X3 | |
| SEQ ID NO. 576 | IL18R1 | mRNA Transcript | XM_017005181.1 |
| | | Variant X4 | |
| SEQ ID NO. 577 | IL18R1 | misc RNA Transcript | XR_923054.2 |
| | | Variant X5 | |
| SEQ ID NO. 578 | IL18R1 | mRNA Transcript | XM_017005182.1 |
| | | Variant X6 | |
| SEQ ID NO. 579 | IL18R1 | mRNA Transcript | XM_017005183.1 |
| | | Variant X7 | |
| SEQ ID NO. 580 | IL18R1 | mRNA Transcript | XM_017005184.1 |
| | | Variant X8 | |
| SEQ ID NO. 581 | CCDC47 | mRNA | NM_020198.2 |
| SEQ ID NO. 582 | CCDC47 | mRNA Transcript | XM_005257527.2 |
| | | Variant X1 | |
| SEQ ID NO. 583 | FZD4 | mRNA | NM_012193.3 |
| SEQ ID NO. 584 | SHISA9 | mRNA Transcript | NM_001145205.1 |
| | | Variant 2 | |
| SEQ ID NO. 585 | SHISA9 | mRNA Transcript | NM_001145204.2 |
| | | Variant 1 | |
| SEQ ID NO. 586 | SHISA9 | mRNA Transcript | XM_005255539.3 |
| | | Variant X1 | |
| SEQ ID NO. 587 | SHISA9 | mRNA Transcript | XM_011522642.2 |
| | | Variant X2 | |
| SEQ ID NO. 588 | SHISA9 | misc RNA Transcript | XR_932915.2 |
| | | Variant X3 | |
| SEQ ID NO. 589 | SHISA9 | misc RNA Transcript | XR_001751975.1 |
| | | Variant X4 | |
| SEQ ID NO. 590 | SHISA9 | misc RNA Transcript | XR_001751976.1 |
| | | Variant X5 | |
| SEQ ID NO. 591 | SORCS1 | mRNA Transcript | NM_001206570.1 |
| | | Variant 4 | |
| SEQ ID NO. 592 | SORCS1 | mRNA Transcript | NM_001206571.1 |
| | | Variant 5 | |
| SEQ ID NO. 593 | SORCS1 | mRNA Transcript | NM_001206572.1 |
| | | Variant 6 | |
| SEQ ID NO. 594 | SORCS1 | mRNA Transcript | NM_001013031.2 |
| | | Variant 2 | |
| SEQ ID NO. 595 | SORCS1 | mRNA Transcript | NM_052918.4 |
| | | Variant 1 | |
| SEQ ID NO. 596 | SORCS1 | mRNA Transcript | NM_001206569.1 |
| | | Variant 3 | |
| SEQ ID NO. 597 | SORCS1 | mRNA Transcript | XM_017015614.1 |
| | | Variant X1 | |
| SEQ ID NO. 598 | SORCS1 | mRNA Transcript | XM_011539199.2 |
| | | Variant X2 | |
| SEQ ID NO. 599 | SORCS1 | mRNA Transcript | XM_017015615.1 |
| | | Variant X3 | |
| SEQ ID NO. 600 | SORCS1 | mRNA Transcript | XM_011539201.2 |
| | | Variant X4 | |
| SEQ ID NO. 601 | SORCS1 | mRNA Transcript | XM_017015616.1 |
| | | Variant X5 | |
| SEQ ID NO. 602 | SORCS1 | mRNA Transcript | XM_017015617.1 |
| | | Variant X6 | |
| SEQ ID NO. 603 | SORCS1 | mRNA Transcript | XM_017015618.1 |
| | | Variant X7 | |
| SEQ ID NO. 604 | CLIC4 | mRNA | NM_013943.2 |
| SEQ ID NO. 605 | MS4A2 | cDNA Transcript | NM_000139.4 |
| | | Variant 1 | |
| SEQ ID NO. 606 | MS4A2 | Amino Acid | NP_000130.1 |
| | | Sequence Isoform 1 | |
| SEQ ID NO. 607 | MS4A2 | cDNA Transcript | NM_001256916.1 |
| | | Variant 3 | |
| SEQ ID NO. 608 | MS4A2 | Amino Acid | NP_001243845.1 |
| | | Sequence Isoform 3 | |
| SEQ ID NO. 609 | MLNR | cDNA | NM_001507.1 |
| SEQ ID NO. 610 | MLNR | Amino Acid | NP_001498.1 |
| | | Sequence | |
| SEQ ID NO. 611 | TIGIT | cDNA | NM_173799.3 |
| SEQ ID NO. 612 | TIGIT | Amino Acid | NP_776160.2 |
| | | Sequence | |
| SEQ ID NO. 613 | CNGA1 | cDNA Transcript | NM_001142564.1 |
| | | Variant 1 | |
| SEQ ID NO. 614 | CNGA1 | Amino Acid | NP_001136036.1 |
| | | Sequence Isoform 1 | |
| SEQ ID NO. 615 | CNGA1 | cDNA Transcript | NM_000087.3 |
| | | Variant 2 | |
| SEQ ID NO. 616 | CNGA1 | Amino Acid | NP_000078.2 |
| | | Sequence Isoform 2 | |
| SEQ ID NO. 617 | SIRPB2 | cDNA Transcript | NM_001122962.1 |
| | | Variant 1 | |
| SEQ ID NO. 618 | SIRPB2 | Amino Acid | NP_001116434.1 |
| | | Sequence Isoform 1 | |
| | | Precursor | |
| SEQ ID NO. 619 | SIRPB2 | cDNA Transcript | NM_001134836.1 |
| | | Variant 2 | |
| SEQ ID NO. 620 | SIRPB2 | Amino Acid | NP_001128308.1 |
| | | Sequence Isoform 2 | |
| | | Precursor | |
| SEQ ID NO. 621 | PRRG4 | cDNA | NM_024081.5 |
| SEQ ID NO. 622 | PRRG4 | Amino Acid | NP_076986.1 |
| | | Sequence | |
| SEQ ID NO. 623 | VSTM4 | cDNA Transcript | NM_001031746.4 |
| | | Variant 1 | |
| SEQ ID NO. 624 | VSTM4 | Amino Acid | NP_001026916.2 |
| | | Sequence Isoform 1 | |
| | | Precursor | |
| SEQ ID NO. 625 | VSTM4 | cDNA Transcript | NM_144984.3 |
| | | Variant 2 | |
| SEQ ID NO. 626 | VSTM4 | Amino Acid | NP_659421.1 |
| | | Sequence Isoform 2 | |
| | | Precursor | |
| SEQ ID NO. 627 | TMEM107 | cDNA Transcript | NM_032354.4 |
| | | Variant 1 | |
| SEQ ID NO. 628 | TMEM107 | Amino Acid | NP_115730.2 |
| | | Sequence Isoform 1 | |
| SEQ ID NO. 629 | TMEM107 | cDNA Transcript | NM_183065.3 |
| | | Variant 2 | |
| SEQ ID NO. 630 | TMEM107 | Amino Acid | NP_898888.1 |
| | | Sequence isoform 2 | |
| SEQ ID NO. 631 | TMEM107 | cDNA Transcript | NM_001351278.1 |
| | | Variant 3 | |
| SEQ ID NO. 632 | TMEM107 | Amino Acid | NP_001338207.1 |
| | | Sequence isoform 3 | |
| SEQ ID NO. 633 | TMEM107 | cDNA Transcript | NM_001351279.1 |
| | | Variant 4 | |
| SEQ ID NO. 634 | TMEM107 | Amino Acid | NP_001338208.1 |
| | | Sequence Isoform 4 | |
| SEQ ID NO. 635 | TMEM107 | cDNA Transcript | NM_001351280.1 |
| | | Variant 5 | |
| SEQ ID NO. 636 | TMEM107 | Amino Acid | NP_001338209.1 |
| | | Sequence isoform 5 | |
| SEQ ID NO. 637 | NETO2 | cDNA Transcript | NM_018092.4 |
| | | Variant 1 | |
| SEQ ID NO. 638 | NETO2 | Amino Acid | NP_060562.3 |
| | | Sequence isoform 1 | |
| | | Precursor | |
| SEQ ID NO. 639 | NETO2 | cDNA Transcript | NM_001201477.1 |
| | | Variant 2 | |
| SEQ ID NO. 640 | NETO2 | Amino Acid | NP_001188406.1 |
| | | Sequence Isoform 2 | |
| | | Precursor | |
| SEQ ID NO. 641 | CSF1R | cDNA Transcript | NM_005211.3 |
| | | Variant 1 | |
| SEQ ID NO. 642 | CSF1R | Amino Acid | NP_005202.2 |
| | | Sequence | |
| | | Precursor | |
| SEQ ID NO. 643 | CSF1R | cDNA Transcript | NM_001288705.2 |
| | | Variant 2 | |
| SEQ ID NO. 644 | CSF1R | Amino Acid | NP_001275634.1 |
| | | Sequence | |
| | | Precursor | |
| SEQ ID NO. 645 | CSF1R | cDNA Transcript | NM_001349736.1 |
| | | Variant 4 | |
| SEQ ID NO. 646 | CSF1R | Amino Acid | NP_001336665.1 |
| | | Sequence | |
| | | Precursor | |
| SEQ ID NO. 647 | ADRB2 | cDNA | NM_000024.5 |
| SEQ ID NO. 648 | ADRB2 | Amino Acid | NP_000015.1 |
| | | Sequence | |
| SEQ ID NO. 649 | TLR2 | cDNA Transcript | NM_001318787.1 |
| | | Variant 1 | |
| SEQ ID NO. 650 | TLR2 | Amino Acid | NP_001305716.1 |
| | | Sequence | |
| | | Precursor | |
| SEQ ID NO. 651 | TLR2 | cDNA Transcript | NM_001318789.1 |
| | | Variant 2 | |
| SEQ ID NO. 652 | TLR2 | Amino Acid | NP_001305718.1 |
| | | Sequence | |
| | | Precursor | |
| SEQ ID NO. 653 | TLR2 | cDNA Transcript | NM_003264.4 |
| | | Variant 3 | |
| SEQ ID NO. 654 | TLR2 | Amino Acid | NP_003255.2 |
| | | Sequence | |
| | | Precursor | |
| SEQ ID NO. 655 | TLR2 | cDNA Transcript | NM_001318790.1 |
| | | Variant 4 | |
| SEQ ID NO. 656 | TLR2 | Amino Acid | NP_001305719.1 |
| | | Sequence | |
| | | Precursor | |
| SEQ ID NO. 657 | TLR2 | cDNA Transcript | NM_001318791.1 |
| | | Variant 5 | |
| SEQ ID NO. 658 | TLR2 | Amino Acid | NP_001305720.1 |
| | | Sequence | |
| | | Precursor | |
| SEQ ID NO. 659 | TLR2 | cDNA Transcript | NM_001318793.1 |
| | | Variant 6 | |
| SEQ ID NO. 660 | TLR2 | Amino Acid | NP_001305722.1 |
| | | Sequence | |
| | | Precursor | |
| SEQ ID NO. 661 | TLR2 | cDNA Transcript | NM_001318795.1 |
| | | Variant 7 | |
| SEQ ID NO. 662 | TLR2 | Amino Acid | NP_001305724.1 |
| | | Sequence | |
| | | Precursor | |
| SEQ ID NO. 663 | TLR2 | cDNA Transcript | NM_001318796.1 |
| | | Variant 8 | |
| SEQ ID NO. 664 | TLR2 | Amino Acid | NP_001305725.1 |
| | | Sequence | |
| | | Precursor | |
| SEQ ID NO. 665 | FUT4 | cDNA | NM_002033.3 |
| SEQ ID NO. 666 | FUT4 | Amino Acid | NP_002024.1 |
| | | Sequence | |
| SEQ ID NO. 667 | MGST1 | cDNA Transcript | NM_145792.2 |
| | | Variant 1 | |
| SEQ ID NO. 668 | MGST1 | Amino Acid | NP_665735.1 |
| | | Sequence isoform a | |
| SEQ ID NO. 669 | MGST1 | cDNA Transcript | NM_020300.4 |
| | | Variant 2 | |
| SEQ ID NO. 670 | MGST1 | Amino Acid | NP_064696.1 |
| | | Sequence Isoform a | |
| SEQ ID NO. 671 | MGST1 | cDNA Transcript | NM_145791.2 |
| | | Variant 3 | |
| SEQ ID NO. 672 | MGST1 | Amino Acid | NP_665734.1 |
| | | Sequence Isoform a | |
| SEQ ID NO. 673 | MGST1 | cDNA Transcript | NM_145764.2 |
| | | Variant 4 | |
| SEQ ID NO. 674 | MGST1 | Amino Acid | NP_665707.1 |
| | | Sequence Isoform a | |
| SEQ ID NO. 675 | MGST1 | cDNA Transcript | NM_001260511.1 |
| | | Variant 5 | |
| SEQ ID NO. 676 | MGST1 | Amino Acid | NP_001247440.1 |
| | | Sequence Isoform a | |
| SEQ ID NO. 677 | MGST1 | cDNA Transcript | NM_001260512.1 |
| | | Variant 6 | |
| SEQ ID NO. 678 | MGST1 | Amino Acid | NP_001247441.1 |
| | | Sequence Isoform b | |
| SEQ ID NO. 679 | MGST1 | cDNA Transcript | NM_001267598.1 |
| | | Variant 8 | |
| SEQ ID NO. 680 | MGST1 | Amino Acid | NP_001254527.1 |
| | | Sequence Isoform c | |
| SEQ ID NO. 681 | CSF3R | cDNA Transcript | XM_005270493.1 |
| | | Variant X4 | |
| SEQ ID NO. 682 | CSF3R | Amino Acid | XP_005270550.1 |
| | | Sequence Isoform X3 | |
| SEQ ID NO. 683 | CSF3R | cDNA Transcript | XM_011540749.1 |
| | | Variant X3 | |
| SEQ ID NO. 684 | CSF3R | Amino Acid | XP_011539051.1 |
| | | Sequence Isoform X2 | |
| SEQ ID NO. 685 | CSF3R | cDNA Transcript | XM_017000370.1 |
| | | Variant X1 | |
| SEQ ID NO. 686 | CSF3R | Amino Acid | XP_016855859.1 |
| | | Sequence Isoform X1 | |
| SEQ ID NO. 687 | CSF3R | cDNA Transcript | XM_011540748.2 |
| | | Variant X2 | |
| SEQ ID NO. 688 | CSF3R | Amino Acid | XP_011539050.1 |
| | | Sequence Isoform X1 | |
| SEQ ID NO. 689 | CSF3R | cDNA Transcript | XM_011540750.1 |
| | | Variant X5 | |
| SEQ ID NO. 690 | CSF3R | Amino Acid | XP_011539052.1 |
| | | Sequence Isoform X4 | |
| SEQ ID NO. 691 | HLA-B | cDNA | NM_005514.7 |
| SEQ ID NO. 692 | HLA-B | Amino Acid | NP_005505.2 |
| | | Sequence | |
| | | Precursor | |
| SEQ ID NO. 693 | ITGA10 | cDNA Transcript | NM_003637.4 |
| | | Variant 1 | |
| SEQ ID NO. 694 | ITGA10 | Amino Acid | NP_003628.2 |
| | | Sequence Isoform 1 | |
| | | Precursor | |
| SEQ ID NO. 695 | ITGA10 | cDNA Transcript | NM_001303040.1 |
| | | Variant 2 | |
| SEQ ID NO. 696 | ITGA10 | Amino Acid | NP_001289969.1 |
| | | Sequence Isoform 2 | |
| SEQ ID NO. 697 | ITGA10 | cDNA Transcript | NM_001303041.1 |
| | | Variant 3 | |
| SEQ ID NO. 698 | ITGA10 | Amino Acid | NP_001289970.1 |
| | | Sequence Isoform 3 | |
| | | Precursor | |
| SEQ ID NO. 699 | SLC26A8 | cDNA Transcript | NM_052961.3 |
| | | Variant 1 | |
| SEQ ID NO. 700 | SLC26A8 | Amino Acid | NP_443193.1 |
| | | Sequence Isoform a | |
| SEQ ID NO. 701 | SLC26A8 | cDNA Transcript | NM_138718.2 |
| | | Variant 2 | |
| SEQ ID NO. 702 | SLC26A8 | Amino Acid | NP_619732.2 |
| | | Sequence Isoform b | |
| SEQ ID NO. 703 | SLC26A8 | cDNA Transcript | NM_001193476.1 |
| | | Variant 3 | |
| SEQ ID NO. 704 | SLC26A8 | Amino Acid | NP_001180405.1 |
| | | Sequence Isoform a | |
| SEQ ID NO. 705 | SIRPB1 | cDNA Transcript | NM_001083910.3 |
| | | Variant 2 | |
| SEQ ID NO. 706 | SIRPB1 | Amino Acid | NP_001077379.1 |
| | | Sequence isoform 2 | |
| | | Precursor | |
| SEQ ID NO. 707 | SIRPB1 | cDNA Transcript | NM_001135844.3 |
| | | Variant 3 | |
| SEQ ID NO. 708 | SIRPB1 | Amino Acid | NP_001129316.1 |
| | | Sequence Isoform 3 | |
| | | Precursor | |
| SEQ ID NO. 709 | SIRPB1 | cDNA Transcript | NM_001329157.1 |
| | | Variant 4 | |
| SEQ ID NO. 710 | SIRPB1 | Amino Acid | NP_001316086.1 |
| | | Sequence Isoform 3 | |
| | | Precursor | |
| SEQ ID NO. 711 | SIRPB1 | cDNA Transcript | NM_001330639.1 |
| | | Variant 5 | |
| SEQ ID NO. 712 | SIRPB1 | Amino Acid | NP_001317568.1 |
| | | Sequence Isoform 4 | |
| | | Precursor | |
| SEQ ID NO. 713 | SIRPB1 | cDNA Transcript | NM_006065.4 |
| | | Variant 1 | |
| SEQ ID NO. 714 | SIRPB1 | Amino Acid | NP_006056.2 |
| | | Sequence isoform 1 | |
| | | Precursor | |
| SEQ ID NO. 715 | RAET1E | cDNA Transcript | NM_139165.2 |
| | | Variant 1 | |
| SEQ ID NO. 716 | RAET1E | Amino Acid | NP_631904.1 |
| | | Sequence Isoform 1 | |
| | | Precursor | |
| SEQ ID NO. 717 | RAET1E | cDNA Transcript | NM_001243325.1 |
| | | Variant 2 | |
| SEQ ID NO. 718 | RAET1E | Amino Acid | NP_001230254.1 |
| | | Sequence Isoform 2 | |
| | | Precursor | |
| SEQ ID NO. 719 | RAET1E | cDNA Transcript | NM_001243327.1 |
| | | Variant 3 | |
| SEQ ID NO. 720 | RAET1E | Amino Acid | NP_001230256.1 |
| | | Sequence Isoform 3 | |
| | | Precursor | |
| SEQ ID NO. 721 | RAET1E | cDNA Transcript | NM_001243328.1 |
| | | Variant 4 | |
| SEQ ID NO. 722 | RAET1E | Amino Acid | NP_001230257.1 |
| | | Sequence Isoform 4 | |
| | | Precursor | |
| SEQ ID NO. 723 | ST3GAL6 | cDNA Transcript | NM_001271142.1 |
| | | Variant 2 | |
| SEQ ID NO. 724 | ST3GAL6 | Amino Acid | NP_001258071.1 |
| | | Sequence Isoform 2 | |
| SEQ ID NO. 725 | ST3GAL6 | cDNA Transcript | NM_001271145.1 |
| | | Variant 3 | |
| SEQ ID NO. 726 | ST3GAL6 | Amino Acid | NP_001258074.1 |
| | | Sequence Isoform 3 | |
| SEQ ID NO. 727 | ST3GAL6 | cDNA Transcript | NM_001271146.1 |
| | | Variant 4 | |
| SEQ ID NO. 728 | ST3GAL6 | Amino Acid | NP_001258075.1 |
| | | Sequence Isoform 1 | |
| SEQ ID NO. 729 | ST3GAL6 | cDNA Transcript | NM_001271147.1 |
| | | Variant 5 | |
| SEQ ID NO. 730 | ST3GAL6 | Amino Acid | NP_001258076.1 |
| | | Sequence Isoform 4 | |
| SEQ ID NO. 731 | ST3GAL6 | cDNA Transcript | NM_001271148.1 |
| | | Variant 6 | |
| SEQ ID NO. 732 | ST3GAL6 | Amino Acid | NP_001258077.1 |
| | | Sequence Isoform 5 | |
| SEQ ID NO. 733 | ST3GAL6 | cDNA Transcript | NM_001323352.1 |
| | | Variant 7 | |
| SEQ ID NO. 734 | ST3GAL6 | Amino Acid | NP_ 001310281.1 |
| | | Sequence Isoform 1 | |
| SEQ ID NO. 735 | ST3GAL6 | cDNA Transcript | NM_001323353.1 |
| | | Variant 15 | |
| SEQ ID NO. 736 | ST3GAL6 | Amino Acid | NP_001310282.1 |
| | | Sequence Isoform 5 | |
| SEQ ID NO. 737 | ST3GAL6 | cDNA Transcript | NM_001323358.1 |
| | | Variant 17 | |
| SEQ ID NO. 738 | ST3GAL6 | Amino Acid | NP_001310287.1 |
| | | Sequence Isoform 7 | |
| SEQ ID NO. 739 | ST3GAL6 | cDNA Transcript | NM_001323359.1 |
| | | Variant 18 | |
| SEQ ID NO. 740 | ST3GAL6 | Amino Acid | NP_001310288.1 |
| | | Sequence Isoform 7 | |
| SEQ ID NO. 741 | ST3GAL6 | cDNA Transcript | NM_001323360.1 |
| | | Variant 11 | |
| SEQ ID NO. 742 | ST3GAL6 | Amino Acid | NP_001310289.1 |
| | | Sequence Isoform 2 | |
| SEQ ID NO. 743 | ST3GAL6 | cDNA Transcript | NM_001323362.1 |
| | | Variant 12 | |
| SEQ ID NO. 744 | ST3GAL6 | Amino Acid | NP_001310291.1 |
| | | Sequence isoform 5 | |
| SEQ ID NO. 745 | ST3GAL6 | cDNA Transcript | NM_001323363.1 |
| | | Variant 13 | |
| SEQ ID NO. 746 | ST3GAL6 | Amino Acid | NP_001310292.1 |
| | | Sequence Isoform 5 | |
| SEQ ID NO. 747 | ST3GAL6 | cDNA Transcript | NM_001323364.1 |
| | | Variant 14 | |
| SEQ ID NO. 748 | ST3GAL6 | Amino Acid | NP_001310293.1 |
| | | Sequence Isoform 5 | |
| SEQ ID NO. 749 | ST3GAL6 | cDNA Transcript | NM_001323365.1 |
| | | Variant 8 | |
| SEQ ID NO. 750 | ST3GAL6 | Amino Acid | NP_001310294.1 |
| | | Sequence Isoform 1 | |
| SEQ ID NO. 751 | ST3GAL6 | cDNA Transcript | NM_001323366.1 |
| | | Variant 10 | |
| SEQ ID NO. 752 | ST3GAL6 | Amino Acid | NP_001310295.1 |
| | | Sequence isoform 2 | |
| SEQ ID NO. 753 | ST3GAL6 | cDNA Transcript | NM_001323367.1 |
| | | Variant 16 | |
| SEQ ID NO. 754 | ST3GAL6 | Amino Acid | NP_001310296.1 |
| | | Sequence Isoform 6 | |
| SEQ ID NO. 755 | ST3GAL6 | cDNA Transcript | NM_001323368.1 |
| | | Variant 9 | |
| SEQ ID NO. 756 | ST3GAL6 | Amino Acid | NP_001310297.1 |
| | | Sequence Isoform 1 | |
| SEQ ID NO. 757 | ST3GAL6 | cDNA Transcript | NM_006100.3 |
| | | Variant 1 | |
| SEQ ID NO. 758 | ST3GAL6 | Amino Acid | NP_006091.1 |
| | | Sequence Isoform 1 | |
| SEQ ID NO. 759 | LAMP1 | cDNA | NM_005561.3 |
| SEQ ID NO. 760 | LAMP1 | Amino Acid | NP_005552.3 |
| | | Precursor | |
| SEQ ID NO. 761 | LGALS1 | cDNA | NM_002305.3 |
| SEQ ID NO. 762 | LGALS1 | Amino Acid | NP_002296.1 |
| | | Sequence | |
| SEQ ID NO. 763 | CD34 | Amino Acid | |
| | | Sequence | |
| SEQ ID NO. 764 | CD45RA | Amino Acid | |
| | | Sequence | |
| SEQ ID NO. 765 | CD90 | Amino Acid | |
| | | Sequence | |
| SEQ ID NO. 766 | CD123 | Amino Acid | |
| | | Sequence | |
| SEQ ID NO. 767 | CD38 | Amino Acid | |
| | | Sequence | |
| SEQ ID NO. 768 | CD19 | Amino Acid | |
| | | Sequence | |
| SEQ ID NO. 769 | CD10 | Amino Acid | |
| | | Sequence | |
| SEQ ID NO. 770 | CD33 | Amino Acid | |
| | | Sequence | |
| SEQ ID NO. 771 | CD45 | Amino Acid | |
| | | Sequence | |
| SEQ ID NO. 772 | CD34 | Nucleic Acid | |
| | | Sequence | |
| SEQ ID NO. 773 | CD45RA | Nucleic Acid | |
| | | Sequence | |
| SEQ ID NO. 774 | CD90 | Nucleic Acid | |
| | | Sequence | |
| SEQ ID NO. 775 | CD123 | Nucleic Acid | |
| | | Sequence | |
| SEQ ID NO. 776 | CD38 | Nucleic Acid | |
| | | Sequence | |
| SEQ ID NO. 777 | CD19 | Nucleic Acid | |
| | | Sequence | |
| SEQ ID NO. 778 | CD10 | Nucleic Acid | |
| | | Sequence | |
| SEQ ID NO. 779 | CD33 | Nucleic Acid | |
| | | Sequence | |
| SEQ ID NO. 780 | CD45 | Nucleic Acid | |
| | | Sequence | |

CD34 amino acid sequence
(SEQ ID NO: 763)
mlvrrgarag prmprgwtal cllsllpsgf msldnngtat pelptqgtfs nvstnvsyqe
tttpstlgst slhpvsqhgn eattnitett vkftstsvit svygntnssv qsqtsvistv
fttpanvstp ettdkpslsp gnvsdlstts tslatsptkp ytssspilsd ikaeikcsgi
revkltqgic leqnktssca efkkdrgegl arvlcgeeqa dadagaqvcs lllaqsevrp
qclllvlanr teisskiqlm kkhqsdlkkl gildfteqdv ashqsysqkt lialvtsgal
lavigitgyf lmnrrswspt gerlelep
CD45RA amino acid sequence
(SEQ ID NO: 764)
MYLWLKLLAFGHAFLDTEVFVTGQPTPSPTDAYLNASETTTLS
PSGSAVISTTTIATTPSKPTCDEKYANITVDYLYNKETKLFTAKLNVNENVECGNNTC
TNNEVHNLTECKNASVSISHNSCTAPDKTLILDVPPGVEKFQLHDCTQVEKADTTICL
KWKNIETFTCDTQNITYRFQCGNMIFDNKEIKLENLEPEHEYKCDSEILYNNHKFTNA
SKIIKTDFGSPGEPQIIFCRSEAAHQGVITWNPPQRSFHNFTLCYIKETEKDCLNLDK
NLIKYDLQNLKPYTKYVLSLHAYIIAKVQRNGSAAMCHFTTKSAPPSQVWNMTVSMTS
DNSMHVKCRPPRDRNGPHERYHLEVEAGNTLVRNESHKNCDFRVKDLQYSTDYTFKAY
FHNGDYPGEPFILHHSTSYNSKALIAFLAFLIIVTSIALLVVLYKIYDLHKKRSCNLD
EQQELVERDDEKQLMNVEPIHADILLETYKRKIADEGRLFLAEFQSIPRVFSKFPIKE
ARKPFNQNKNRYVDILPYDYNRVELSEINGDAGSNYINASYIDGFKEPRKYIAAQGPR
DETVDDFWRMIWEQKATVIVMVTRCEEGNRNKCAEYWPSMEEGTRAFGDVVVKINQHK
RCPDYIIQKLNIVNKKEKATGREVTHIQFTSWPDHGVPEDPHLLLKLRRRVNAFSNFF
SGPIVVHCSAGVGRTGTYIGIDAMLEGLEAENKVDVYGYVVKLRRQRCLMVQVEAQYI
LIHQALVEYNQFGETEVNLSELHPYLHNMKKRDPPSEPSPLEAEFQRLPSYRSWRTQH
IGNQEENKSKNRNSNVIPYDYNRVPLKHELEMSKESEHDSDESSDDDSDSEEPSKYIN
ASFIMSYWKPEVMIAAQGPLKETIGDFWQMIFQRKVKVIVMLTELKHGDQEICAQYWG
EGKQTYGDIEVDLKDTDKSSTYTLRVFELPHSKRKDSRTVYQYQYTNWSVEQLPAEPK
ELISMIQVVKQKLPQKNSSEGNKHHKSTPLLIHCRDGSQQTGIFCALLNLLESAETEE
VVDIFQVVKALRKARPGMVSTFEQYQFLYDVIASTYPAQNGQVKKNNHQEDKIEFDNE
[sequence omitted]
CD90 amino acid sequence
(SEQ ID NO: 765)
MNLAISIALLLTVLQVSRGQKVTSLTACLVDQSLRLDCRHENTS
SSPIQYEFSLTRETKKHVLFGTVGVPEHTYRSRTNFTSKYNMKVLYLSAFTSKDEGTY
TCALHHSGHSPPISSQNVTVLRDKLVKCEGISLLAQNTSWLLLLLLSLSLLQATDFMS
L
CD123 amino acid sequence
(SEQ ID NO: 766)
MVLLWLTLLLIALPCLLQTKEDPNPPITNLRMKAKAQQLTWDLN
RNVTDIECVKDADYSMPAVNNSYCQFGAISLCEVTNYTVRVANPPFSTWILFPENSGK
PWAGAENLTCWIHDVDFLSCSWAVGPGAPADVQYDLYLNVANRRQQYECLHYKTDAQG
TRIGCRFDDISRLSSGSQSSHILVRGRSAAFGIPCTDKFVVFSQIEILTPPNMTAKCN
KTHSFMHWKMRSHFNRKFRYELQIQKRMQPVITEQVRDRTSFQLLNPGTYTVQIRARE
RVYEFLSAWSTPQRFECDQEEGANTRAWRTSLLIALGTLLALVCVFVICRRYLVMQRL
FPRIPHMKDPIGDSFQNDKLVVWEAGKAGLEECLVTEVQVVQKT
CD38 amino acid sequence
(SEQ ID NO: 767)
MANCEFSPVSGDKPCCRLSRRAQLCLGVSILVLILVVVLAVVVP
RWRQQWSGPGTTKRFPETVLARCVKYTEIHPEMRHVDCQSVWDAFKGAFISKHPCNIT
EEDYQPLMKLGTQTVPCNKILLWSRIKDLAHQFTQVQRDMFTLEDTLLGYLADDLTWC
GEFNTSKINYQSCPDWRKDCSNNPVSVFWKTVSRRFAEAACDVVHVMLNGSRSKIFDK
NSTFGSVEVHNLQPEKVQTLEAWVIHGGREDSRDLCQDPTIKELESIISKRNIQFSCK
NIYRPDKFLQCVKNPEDSSCTSEI
CD19 amino acid sequence
(SEQ ID NO: 768)
MPPPRLLFFLLFLTPMEVRPEEPLVVKVEEGDNAVLQCLKGTSD
GPTQQLTWSRESPLKPFLKLSLGLPGLGIHMRPLAIWLFIFNVSQQMGGFYLCQPGPP
SEKAWQPGWTVNVEGSGELFRWNVSDLGGLGCGLKNRSSEGPSSPSGKLMSPKLYVWA
KDRPEIWEGEPPCLPPRDSLNQSLSQDLTMAPGSTLWLSCGVPPDSVSRGPLSWTHVH
PKGPKSLLSLELKDDRPARDMWVMETGLLLPRATAQDAGKYYCKRGNLTMSFHLEITA
RPVLWHWLLRTGGWKVSAVTLAYLIFCLCSLVGILHLQRALVLRRKRKRMTDPTRRFF
KVTPPPGSGPQNQYGNVLSLPTPTSGLGRAQRWAAGLGGTAPSYGNPSSDVQADGALG
SRSPPGVGPEEEEGEGYEEPDSEEDSEFYENDSNLGQDQLSQDGSGYENPEDEPLGPE
DEDSFSNAESYENEDEELTQPVARTMDFLSPHGSAWDPSREATSLGSQSYEDMPGILY
AAPQLRSIRGQPGPNHEEDADSYENMDNPDGPDPAWGGGGRMGTWSTR
CD10 amino acid sequence
(SEQ ID NO: 769)
MGKSESQMDITDINTPKPKKKQRWTPLEISLSVLVLLLTIIAVTMIALYATYDDGICKSS
DCIKSAARLIQNMDATTEPCTDFFSKYACGGWLKRNVIPETSSRYGNFDILRDELEVVLKD
VLQEPKTEDIVAVQKAKALYRSCINESAIDSRGGEPLLKLLPDIYGWPVATENWEQKYGA
SWTAEKAIAQLNSKYGKKVLINLFVGTDDKNSVNHVIHIDQPRLGLPSRDYYSCTGIYKE
ACTAYVDFMISVARLIRQEERLPIDENQLALEMNKVMELEKEIANATAKPEDRNDPMLLY
NKMTLAQIQNNFSLEINGKPFSWLNFTNEIMSTVNISITNEEDVVVYAPEYLTKLKPILT
KYSARDLQNLMSWRFIMDLVSSLSRTYKESRNAFRKALYGTTSETATWRRCANYVNGNME
NAVGRLYVEAAFAGESKHVVEDLIAQIREVFIQTLDDLTWMDAETKKRAEEKALAIKERI
GYPDDIVSNDNKLNNEYLELNYKEDEYFENIIQNLKFSQSKQLKKLREKVDKDEWISGAA
VVNAFYSSGRNQIVFPAGILQPPFFSAQQSNSLNYGGIGMVIGHEITHGFDDNGRNFNKD
GDLVDWWTQQSASNFKEQSQCMVYQYGNFSWDLAGGQHLNGINTLGENIADNGGLGQAYR
AYQNYIKKNGEEKLLPGLDLNHKQLFFLNFAQVWCGTYRPEYAVNSIKTDVHSPGNFRII
GTLQNSAEFSEAFHCRKNSYMNPEKKCRVW
CD33 amino acid sequence
(SEQ ID NO: 770)
MPLLLLLPLLWAGALAMDPNFWLQVQESVTVQEGLCVLVPCTFFHPIPYYDKNSPVHGYW
FREGAIISRDSPVATNKLDQEVQEETQGRFRLLGDPSRNNCSLSIVDARRRDNGSYFFRM
ERGSTKYSYKSPQLSVHVTDLTHRPKILIPGTLEPGHSKNLTCSVSWACEQGTPPIFSWL
SAAPTSLGPRTTHSSVLIITPRPQDHGTNLTCQVKFAGAGVTTERTIQLNVTYVPQNPTT
GIFPGDGSGKQSTRAGVVHGAIGGAGVTALLALCLCLIFFIVKTHRRKAARTAVGRNDTH
PTTGSASPKHQKKSKLHGPTETSSCSGAAPTVEMDEELHYASLNFHGMNPSKDTSTEYSE
VRTQ
CD45 amino acid sequence
(SEQ ID NO: 771)
MYLWLKLLAFGFAFLDTEVFVTGQSPTPSPTGLTTAKMPSVPLSSDPLPTHTTAFSPAST
FERENDFSETTTSLSPDNTSTQVSPDSLDNASAFKTTGVSSVQTPHLPTHADSQTPSAGT
DTQTFSGSAANAKLNPTPGSNAISDVPGSRSTASTFPTDPVSPLTTTLSLAKHSSAALPA
RTSNTTITANTSDAYLNASETTTLSPSGSAVISTTTIATTPSKPTCDEKYANITVDYLYN
KETKLFTAKLNVNENVECGNNTCTNNEVHNLTECKNASVSISHNSCTAPDKTLILDVPPG
VEKFQLHDCTQVEKADTTICLKWKNIETFTCDTQNITYRFQCGNMIFDNKEIKLENLEPE
HEYKCDSEILYNNHKFTNASKIIKTDFGSPGEPQIIFCRSEAAHQGVITWNPPQRSFHMF
TLCYIKETEKDCLNLDKNLIKYDLQNLKPYTKYVLSLHAYIIAKVQRNGSAAMCHFTTKS
APPSQVWNMTVSMTSDNSMHVKCRPPRDRNGPHERYHLEVEAGNTLVRNESHKNCDFRVK
DLQYSTDYTFKAYFHNGDYPGEPFILHHSTSYNSKALIAFLAFLIIVTSIALLVVLYKIY
DLHKKRSCNLDEQQELVERDDEKQLMNVEPIHADILLETYKRKIADEGRLFLAEFQSIPR
VFSKFPIKEARKPFNQNKNRYVDILPYDYNRVELSEINGDAGSNYINASYIDGFKEPRKY
IAAQGPRDETVDDFWRMIWEQKATVIVMVTRCEEGNRNKCAEYWPSMEEGTRAFGDVVVK
INQHKRCPDYIIQKLNIVNKKEKATGPEVTHIQFTSWPDHGVPEDPHLLLKLRRRVNAFS
NFFSGPIVVHCSAGVGRTGTYIGIDAMLEGLEAENKVDVYGYVVKLRRQRCLMVQVEAQY
ILIHQALVEYNQFGETEVNLSELHPYLHNMKKRDPPSEPSPLEAEFQRLPSYRSWRTQHI
GNQEENKSKNRNSNVIPYDYNRVPLKHELEMSKESEHDSDESSDDDSDSEEPSKYINASF
IMSYWKPEVMIAAQGPLKETIGDFWQMIFQRKVKVIVMLTELKHGDQEICAQYWGEGKQT
YGDIEVDLKDTDKSSTYTLRVFELRHSKRKDSRTVYQYQYTNWSVEQLPAEPKELISMIQ
VVKQKLPQKNSSEGNKHHKSTPLLIHCRDGSQQTGIFCALLNLLESAETEEVVDIFQVVK
ALRKARPGMVSTFEQYQFLYDVIASTYPAQNGQVKKNNHQEDKIEFDNEVDKVKQDANCV
NPLGAPEKLPFEAKEQAEGSEPTSGTEGPEHSVNGPASPALNQGS
CD34 nucleic acid sequence
(SEQ ID NO: 772)
atgctggtcc gcaggggcgc gcgcgcaggg cccaggatgc cgcggggctg gaccgcgctt
tgcttgctga gtttgctgcc ttctgggttc atgagtcttg acaacaacgg tactgctacc
ccagagttac ctacccaggg aacattttca aatgtttcta caaatgtatc ctaccaagaa
actacaacac ctagtaccct tggaagtacc agcctgcacc ctgtgtctca acatggcaat
gaggccacaa caaacatcac agaaacgaca gtcaaattca catctacctc tgtgataacc
tcagtttatg gaaacacaaa ctcttctgtc cagtcacaga cctctgtaat cagcacagtg
ttcaccaccc cagccaacgt ttcaactcca gagacaacct tgaagcctag cctgtcacct
ggaaatgttt cagacctttc aaccactagc actagccttg caacatctcc cactaaaccc
tatacatcat cttctcctat cctaagtgac atcaaggcag aaatcaaatg ttcaggcatc
agagaagtga aattgactca gggcatctgc ctggagcaaa ataagacctc cagctgtgcg
gagtttaaga aggacagggg agagggcctg gcccgagtgc tgtgtgggga ggagcaggct
gatgctgatg ctggggccca ggtatgctcc ctgctccttg cccagtctga ggtgaggcct
cagtgtctac tgctggtctt ggccaacaga acagaaattt ccagcaaact ccaacttatg
aaaaagcacc aatctgacct gaaaaagctg gggatcctag atttcactga gcaagatgtt
gcaagccacc agagctattc ccaaaagacc ctgattgcac tggtcacctc gggagccctg
ctggctgtct tgggcatcac tggctatttc ctgatgaatc gccgcagctg gagocccaca
ggagaaaggc tgggcgaaga cccttattac acggaaaacg gtggaggcca gggctatagc
tcaggacctg ggacctcccc tgaggctcag ggaaaggcca gtgtgaaccg aggggctcag
gaaaacggga ccggccaggc cacctccaga aacggccatt cagcaagaca acacgtggtg
gctgataccg aattgtga
CD45RA nucleic acid seguence
(SEQ ID NO: 773)
atgtatttgt ggcttaaact cttggcattt ggctttgcct ttctggacac agaagtattt
gtgacagggc aaagoccaac accttccccc actggattga ctacagcaaa gatgcccagt
gttccacttt caagtgaccc cttacctact cacaccactg cattctcacc cgcaagcacc
tttgaaagag aaaatgactt ctcagagacc acaacttctc ttagtccaga caatacttcc
acccaagtat ccccggactc tttggataat gctagtgctt ttaataccac aggtgtttca
tcagtacaga cgcctcacct tcccacgcac gcagactcgc agacgccctc tgctggaact
gacacgcaga cattcagcgg ctccgccgcc aatgcaaaac tcaaccctac cccaggcagc
aatgctatct cagatgtccc aggagagagg agtacagcca gcacctttcc tacagaccca
gtttccccat tgacaaccac cctcagcctt gcacaccaca gctctgctgc cttacctgca
cgcacctcca acaccaccat cacagcgaac acctcagatg cctaccttaa tgcctctgaa
acaaccactc tgagcccttc tggaagcgct gtcatttcaa ccacaacaat agctactact
ccatctaagc caacatgtga tgaaaaatat gcaaacatca ctgtggatta cttatataac
aaggaaacta aattatttac agcaaagcta aatgttaatg agaatgtgga atgtggaaac
aatacttgca caaacaatga ggtgcataac cttacagaat gtaaaaatgc gtctgtttcc
atatctcata attcatgtac tgctcctgat aagacattaa tattagatgt gccaccaggg
gttgaaaagt ttcagttaca tgattgtaca caagttgaaa aagcagatac tactatttgt
ttaaaatgga aaaatattga aacctttact tgtgatacac agaatattac ctacagattt
cagtgtggta atatgatatt tgataataaa gaaattaaat tagaaaacct tgaacccgaa
catgagtata agtgtgactc agaaatactc tataataacc acaagtttac taacgcaagt
aaaattatta aaacagattt tgggagtcca ggagagcctc agattatttt ttgtagaagt
gaagctgcac atcaaggagt aattacctgg aatccccctc aaagatcatt tcataatttt
accctctgtt atataaaaga gacagaaaaa gattgcctca atctggataa aaacctgatc
aaatatgatt tgcaaaattt aaaaccttat acgaaatatg ttttatcatt acatgcctac
atcattgcaa aagtgcaacg taatggaagt gctgcaatgt gtcatttcac aactaaaagt
gctcctccaa gccaggtctg gaacatgact gtctccatga catcagataa tagtatgcat
gtcaagtgta ggcctcccag ggaccgtaat ggcccccatg aacgttacca tttggaagtt
gaagctggaa atactctggt tagaaatgag tcgcataaga attgcgattt ccgtgtaaaa
gatcttcaat attcaacaga ctacactttt aaggcctatt ttcacaatgg agactatcct
ggagaaccct ttattttaca tcattcaaca tcttataatt ctaaggcact gatagcattt
ctggcatttc tgattattgt gacatcaata gccctgcttg ttgttctcta caaaatctat
gatctacata agaaaagatc ctgcaattta gatgaacagc aggagcttgt tgaaagggat
gatgaaaaac aactgatgaa tgtggagcca atccatgcag atattttgtt ggaaacttat
aagaggaaga ttgctgatga aggaagactt tttctggctg aatttcagag catcccgcgg
gtgttcagca agtttcctat aaaggaagct cgaaagccct ttaaccagaa taaaaaccgt
tatgttgaca ttcttcctta tgattataac cgtgttgaac tctctgagat aaacggagat
gcagggtcaa actacataaa tgccagctat attgatggtt tcaaagaacc caggaaatac
attgctgcac aaggLoccag ggatgaaact gttgatgatt tctgmaggat gatttgggaa
cagaaagcca cagttattgt catggtcact cgatgtgaag aaggaaacag gaacaagtgt
gcagaatact ggccgtcaat ggaagagggc actcgggctt ttggagatgt tgttgtaaag
atcaaccagc acaaaagatg tccagattac atcattcaga aattgaacat tgtaaataaa
aaagaaaaag caactggaag agaggtgact cacattcagt tcaccagctg gccagaccac
ggggtgcctg aggatcctca cttgctcctc aaactgagaa ggagagtgaa tgccttcagc
aatttcttca gtggtcccat tgtggtgcac tgcagtgctg gtgttgggcg cacaggaacc
tatatcggaa ttgatgccat gctagaaggc ctggaagccg agaacaaagt ggatgtttat
ggttatgttg tcaagctaag gcgacagaga tgcctgatgg ttcaagtaga ggcccagtac
atcttgatcc atcaggcttt ggtggaatac aatcagtttg gagaaacaga agtgaatttg
tctgaattac atccatatct acataacatg aagaaaaggg atccacccag tgagccgtct
ccactagagg ctgaattcca gagacttcct tcatatagga gctggaggac acagcacatt
ggaaatcaag aagaaaataa aagtaaaaac aggaattcta atgtcatccc atatgactat
aacagagtgc cacttaaaca tgagctggaa atgagtaaag agagtgagca tgattcagat
gaatcctctg atgatgacag tgattcagag gaaccaagca aatacatcaa tgcatctttt
ataatgagct actggaaacc tgaagtgatg attgctgctc agggaccact gaaggagacc
attggtgact tttggcagat gatcttccaa agaaaagtca aagttattgt tatgctgaca
gaactgaaac atggagacca ggaaatctgt gctcagtact ggggagaagg aaagcaaaca
tatggagata ttgaagttga cctgaaagac acagacaaat cttcaactta tacccttcgt
gtctttgaac tgagacattc caagaggaaa gactctcgaa ctgtgtacca gtaccaatat
acaaactgga gtgtggagca gcttcctgca gaacccaagg aattaatctc tatgattcag
gtcgtcaaac aaaaacttcc ccagaagaat tcctctgaag ggaacaagca tcacaagagt
acacctctac tcattcactg cagggatgga tatcagcaaa cgggaatatt ttgtgctttg
ttaaatctct tagaaagtgc ggaaacagaa gaggtagtgg atatttttca agtggtaaaa
gctctacgca aagctaggcc aggcatggtt tccacattcg agcaatatca attcctatat
gacgtcattg ccagcaccta ccctgctcag aatggacaag taaagaaaaa caaccatcaa
gaagataaaa ttgaatttga taatgaagtg gacaaagtaa agcaggatgc taattgtgtt
aatccacttg gtgccccaga aaagctccct gaagcaaagg aacaggctga aggttctgaa
cccacgagtg gcactgaggg gccagaacat tctgtcaatg gtcctgcaag tccagcttta
aatcaaggtt catag
CD90 nucleic acid sequence
(SEQ ID NO: 774)
atgaacctgg ccatcagcat cgctctoctg ctaacagtct tgcaggtctc ccgagggcag
aaggtgacca gcctaacggc ctgcctagtg gaccagagcc ttcgtctgga ctgccgccat
gagaatacca gcagttcacc catccagtac gagttcagcc tgacccgtga gacaaagaag
cacgtgctct ttggcactgt gggggtgcct gagcacacat accgctcccg aaccaacttc
accagcaaat acaacatgaa ggtcctctac ttatccgcct tcactagcaa ggacgagggc
acctacacgt gtgcactcca ccactctggc cattccccac ccatctcctc ccagaacgtc
acagtgctca gagacaaact ggtcaagtgt gagggcatca gcctgctggc tcagaacacc
tcgtggctgc tgctgctcct gctctccctc tccctcctcc aggccacgga tttcatgtcc
ctgtga
CD123 nucleic acid sequence
(SEQ ID NO: 775)
atggtcctcc tttggctcac gctgctectg atcgccctgc cctgtotcct gcaaacgaag
gaagatccaa acccaccaat cacgaaccta aggatgaaag caaaggctca gcagttgacc
tgggacctta acagaaatgt gaccgatatc gagtgtgtta aagacgccga ctattctatg
ccggcagtga acaatagcta ttgccagttt ggagcaattt ccttatgtga agtgaccaac
tacaccgtcc gagtggccaa cccaccattc tccacgtgga tcctcttccc tgagaacagt
gggaagcctt gggcaggtgc ggagaatctg acctgctgga ttcatgacgt ggatttcttg
agctgcagct gggcggtagg cccgggggcc cccgcggacg tccagtacga cctgtacttg
aacgttgcca acaggcgtca acagtacgag tgtcttcact acaaaacgga tgctcaggga
acacgtatcg ggtgtcgttt cgatgacatc tctcgactct ccagcggttc tcaaagttcc
cacatcctgg tgcggggcag gagcgcagcc ttcggtatcc cctgcacaga taagtttgtc
gtcttttcac agattgagat attaactcca cccaacatga ctgcaaagtg taataagaca
cattccttta tgcactggaa aatgagaagt catttcaatc gcaaatttcg ctatgagctt
cagatacaaa agagaatgca gcctgtaatc acagaacagg tcagagacag aacctccttc
cagctactca atcctggaac gtacacagta caaataagag cccgggaaag agtgtatgaa
ttcttgagcg cctggagcac cccccagcgc ttcgagtgcg accaggagga gggcgcaaac
acacgtgcct ggcggacgtc gctgctgatc gcgctgggga cgctgctggc cctggtctgt
gtcttcgtga tctgcagaag gtatctggtg atgcagagac tctttccccg catccctcac
atgaaagacc ccatcggtga cagottccaa aacgacaagc tggtggtctg ggaggcgggc
aaagccggcc tggaggagtg tctggtgact gaagtacagg tcgtgcagaa aacttga
CD38 nucleic acid sequence
(SEQ ID NO: 776)
atggccaact gcgagttcag cccggtgtcc ggggacaaac cctgctgccg gctctctagg
agagcccaac tctgtcttgg cgtcagtatc ctggtcctga tcctcgtcgt ggtgctcgcg
gtggtcgtcc cgaggtggcg ccagcagtgg agoggtccgg gcaccaccaa gcgctttccc
gagaccgtcc tggcgcgatg cgtcaagtac actgaaattc atcctgagat gagacatgta
gactgccaaa gtgtatggga tgctttcaag ggtgcattta tttcaaaaca tccttgcaac
attactgaag aagactatca gccactaatg aagttgggaa ctcagaccgt accttgcaac
aagattcttc tttggagcag aataaaagat ctggcccatc agttcacaca ggtccagcgg
gacatgttca ccctggagga cacgctgcta ggctaccttg ctgatgacct cacatggtgt
ggtgaattca acacttccaa aataaactat caatcttgcc cagactggag aaaggactgc
agcaacaacc ctgtttcagt attctggaaa acggtttccc gcaggtttgc agaagctgcc
tgtgatgtgg tccatgtgat gctcaatgga tcccgcagta aaatctttga caaaaacagc
acttttggga gtgtgmaagt ccataatttg caaccagaga aggbtcagac actagaggcc
tgggtgatac atggtggaag agaagattcc agagacttat gccaggatcc caccataaaa
gagctggaat cgattataag caaaaggaat attcaatttt cctgcaagaa tatctacaga
cctgacaagt ttcttcagtg tgtgaaaaat cctgaggatt catcttgcac atctgagatc
tga
CD19 nucleic acid sequence
(SEQ ID NO: 777)
atgccacctc ctcgcctcct cttcttcctc ctcttcctca cccccatgga agtcaggccc
gaggaacctc tagtggtgaa ggtggaagag ggagataacg ctgtgctgca gtgcctcaag
gggacctcag atggccccac tcagcagctg acctggtctc gggagtcccc gcttaaaccc
ttcttaaaac tcagcctggg gctgccaggc ctgggaatcc acatgaggcc cctggccatc
tggcttttca tcttcaacgt ctctcaacag atggggggct tctacctgtg ccagccgccn
cccccctctg agaaggcctg gcagcctggc tggacagtca atgtggaggg cagcggggag
ctgttccggt ggaatgtttc ggacctaggt ggcctgggct gtggcctgaa gaacaggtcc
tcagagggcc ccagctcccc ttccgggaag ctcatgagcc ccaagctgta tgtgtgggcc
aaagaccgcc ctgagatctg ggagggagag cctccgtgtc tcccaccgag ggacagcctg
aaccagagcc tcagccagga cctcaccatg gcccctggct ccacactctg gctgtcctgt
ggggtacccc ctgactctgt gtccaggggc cccctctcct ggacccatgt gcaccccaag
gggcctaagt cattgctgag cctagagctg aaggacgatc gcccggccag agatatgtgg
gtaatggaga cgggtctgtt gttgccccgg gccacagctc aagacgctgg aaagtattat
tgtcaccgtg gcaacctgac catgtcattc cacctggaga tcactgctcg gccagtacta
tggcactggc tgctgaggac tggtggctgg aaggtctcag ctgtgacttt ggcttatctg
atcttctgcc tgtgttccct tgtgggcatt cttcatcttc aaagagccct ggtcctgagg
aggaaaagaa agcgaatgac tgaccccacc aggagattct tcaaagtgac gcctccccca
ggaagcgggc cccagaacca gtacgggaac gtgctgtctc tccccacacc cacctcaggc
ctcggacgcg cccagcgttg ggccgcaggc ctggggggca ctgccccgtc ttatggaaac
ccgagcagcg acgtccaggc ggatggagcc ttggggtccc ggagcccgcc gggagtgggc
ccagaagaag aggaagggga gggctatgag gaacctgaca gtgaggagga ctccgagttc
tatgagaacg actccaacct tgggcaggac cagctctccc aggatggcag cggctacgag
aaccctgagg atgagcccct gggtcctgag gatgaagact ccttctccaa cgctgagtct
tatgagaacg aggatgaaga gctgacccag ccggtcgcca ggacaatgga cttcctgagc
cctcatgggt cagcctggga ccccagccgg gaagcaacct ccctggggtc ccagtcctat
gaggatatga gaggaatcct gtatgcagcc ccccagctcc gctccattcg gggccagcct
ggacccaatc atgaggaaga tgcagactct tatgagaaca tggataatcc cgatgggcca
gacccagcct ggggaggagg gggccgcatg ggcacctgga gcaccaggtg a
CD10 nucleic acid sequence
(SEQ ID NO: 778)
ATGGGCAAGTCAGAAAGTCAGATGGATATAACTGATATCAACACTCCAAAGCCAAAGAAGAAACAGCGAT
GGACTCCACTGGAGATCAGCCTCTCGGTCCTTGTCCTGCTCCTCACCATCATAGCTGTGACAATGATCGC
ACTCTATGCAACCTACGATGATGGTATTTGCAAGTCATCAGACTGCATAAAATCAGCTGCTCGACTGATC
CAAAACATGGATGCCACCACTGAGCCTTGTACAGACTTTTTCAAATATGCTTGCGGAGGCTGGTTGAAAC
GTAATGTCATTCCCGAGACCAGCTCCCGTTACGGCAACTTTGACATTTTAAGAGATGAACTAGAAGTCGT
TTTGAAAGATGTCCTTCAAGAACCCAAAACTGAAGATATAGTAGCAGTGCAGAAAGCAAAAGCATTGTAC
AGGTCTTGTATAAATGAATCTGCTATTGATAGCAGAGGTGGAGAACCTGTACTCAAACTGTTAGCAGACA
TATATGGGTGGCCAGTAGCAACAGAAAACTGGGAGCAAAAATATGGTGCTTCTTGGACAGCTGAAAAAGC
TATTGCACAACTGAATTCTAAATATGGGAAAAAAGTCCTTATTAATTTGTTTGTTGGCACTGATGATAAG
AATTCTGTGAATCATGTAATTGATATTGACCAACGTCGACTTGGCCTCGCTTCTAGAGATTACTATGAAT
GCACTGGAATCTATAAAGAGGCTTGTACAGCATATGTGGATTTTATGATTTCTGTGGCCAGATTGATTCG
TCAGGAAGAAAGATTGCCCATCGATGAAAACCAGCTTGCTTTGGAAATGAATAAAGTTATGGAATTGGAA
AAAGAAATTGCCAATGCTACGGCTAAACCTGAAGATCGAAATGATCCAATGCTTCTGTATAACAAGATGA
CATTGGCCCAGATCCAAAATAACTTTTCACTAGAGATCAATGGGAAGCCATTCAGCTGGTTGAATTTCAC
AAATGAAATCATGTCAACTGTGAATATTAGTATTACAAATGAGGAAGATGTGGTTGTTTATGCTCCAGAA
TATTTAACCAAACTTAAGCCCATTCTTACCAAATATTCTGCCAGAGATCTTCAAAATTTAATGTCCTGGA
GATTCATAATGGATCTTGTTAGCAGCCTCAGCCGAACCTACAAGGAGTCCAGAAATGCTTTCCGCAAGGC
CCTTTATGGTACAACCTCAGAAACAGCAACTTGGAGACGTTGTGCAAACTATGTCAATGGGAATATGGAA
AATGCTGTGGGGAGGCTTTATGTGGAAGCAGCATTTGCTGGAGAGAGTAAACATGTGGTCGAGGATTTGA
TTGCACAGATCCGAGAAGTTTTTATTCAGACTTTAGATGACCTCACTTGGATGGATGCCGAGACAAAAAA
GAGAGCTGAAGAAAAGGCCTTAGGAATTAAAGAAAGGATGGGCTATGCTGATGACATTGTTTCAAATGAT
AACAAACTGAATAATGAGTACCTCGAGTTGAACTACAAAGAAGATGAATACTTCGAGAACATAATTCAAA
ATTTGAAATTCAGCCAAAGTAAACAACTGAAGAAGCTCCGAGAAAAGGTGGACAAAGATGAGTGGATAAG
TGGAGCAGCTGTAGTCAATGCATTTTACTCTTCAGGAAGAAATCAGATAGTCTTCCCAGCCGGCATTCTG
CAGCCCCCCTTCTTTAGTGCCCAGCAGTCCAACTCATTGAACTATGGGGGCATCGGCATGGTCATAGGAC
ACGAAATCACCCATGGCTTCGATGACAATGGCAGAAACTTTAACAAAGATGGAGACCTCGTTGACTGGTG
GACTCAACAGTCTGCAAGTAACTTTAAGGAGCAATCCCAGTGCATGGTGTATCAGTATGGAAACTTTTCC
TGGGACCTGGCAGGTGGACAGCACCTTAATGGAATTAATACACTGGGAGAAAACATTGCTGATAATGGAG
GTCTTGGTCAAGCATACAGAGCCTATCAGAATTATATTAAAAAGAATGGCGAAGAAAAATTACTTCCTGG
ACTTGACCTAAATCACAAACAACTATTTTTCTTGAACTTTGCACAGGTGTGGTGTGGAACCTATAGGCCA
GAGTATGCGGTTAACTCCATTAAAACAGATGTGCACAGTCCAGGCAATTTCAGGATTATTGGGACTTTGC
AGAACTCTGCAGAGTTTTCAGAAGCCTTTCACTGCCGCAAGAATTCATACATGAATCCAGAAAAGAAGTG
CCGGGTTTGGTGA
CD33 nucleic acid sequence
(SEQ ID NO: 779)
ATGCCGCTGCTGCTACTGCTGCCCCTGCTGTGGGCAGGGGCCCTGGCTATGGATCGAAATTTCTGGCTGC
AAGTGCAGGAGTCAGTGACGGTACAGGAGGGTTTGTGCGTCCTCGTGCCCTGCACTTTCTTCCATCCCAT
ACCCTACTACGACAAGAACTCCCCAGTTCATGGTTACTGGTTCCGGGAAGGAGCCATTATATCCAGGGAC
TGTCCAGTGGCCACAAACAAGCTAGATCAAGAAGTACAGGAGGAGACTCAGGGCAGATTCCGCCTCCTTG
GGGATCCCAGTAGGAACAACTGCTCCCTGAGCATCGTAGACGCCAGGAGGAGGGATAATGGTTCATACTT
CTTTCGGATGGAGAGAGGAAGTACCAAATACAGTTACAAATCTCCCCAGCTCTCTGTGCATGTGACAGAC
TTGACCCACAGGCCGAAAATCGTCATCCCTGGCAGTCTAGAACCCGGCCAGTGCAAAAACCTGACGTGCT
CTGTGTCCTGGGCCTGTGAGCAGGGAACACCCCCGATCTTCTCCTGGTTGTCAGCTGCCCCCACCTCCCT
GGGCCCCAGGACTACTCACTCCTCGGTGCTCATAATCACCCCACGGCCCCAGGACCACGGCACCAACCTG
ACCTGTCAGGTGAAGTTCGCTGGAGCTGGTGTGACTACGGAGAGAACCATCCAGCTCAACGTCACCTATG
TTCCACAGAACCCAACAACTGGTATCTTTCCAGGAGATGGCTCAGGGAAACAAGAGACCAGAGCAGGAGT
GGTTCATGGGGCCATTGGAGGAGCTGGTGTTACAGCCCTGCTCGCTCTTTGTCTCTGCCTCATCTTCTTC
ATAGTGAAGACCCACAGGAGGAAAGCAGCCAGGACAGCAGTGGGCAGGAATGACACCCACCCTACCACAG
GGTCAGCCTCCCCGAAACACCAGAAGAAGTCCAAGTTACATGGCCCCACTGAAACCTCAAGCTGTTCAGG
TGCCGCCCCTACTGTGGAGATGGATGAGGAGCTGCATTATGCTTCCCTCAACTTTCATGGGATGAATCCT
TGCAAGGACACCTCCACCGAATACTCAGAGGTCAGGAGCCAGTGA
CD45 nucleic acid sequence
(SEQ ID NO: 780)
ATGACCRTGTATTTGTGGCTTAAACTCTTGGCATTTGGCTTTGCCTTTCTGGACACAGAAGTATTTGTGA
CAGGGCAAAGCCCAACACCTTCCCCCACTGGATTGACTACAGCAAAGATGCCCAGTGTTCCACTTTCAAG
TGACCCCTTACCTACTCACACCACTGCATTCTCACCCGCAAGCACCTTTGAAAGAGAAAATGACTTCTCA
GAGACCACAACTTCTCTTAGTCCAGACAATACTTCCACCCAAGTATCCCCGGACTCTTTGGATAATGCTA
GTGCTTTTAATACCACAGGTGTTTCATCAGTACAGACGCCTCACCTTCGCACGCACGCAGACTCGCAGAC
GCCCTCTGCTGGAACTGACACGCAGACATTCAGCGGCTCCGCCGCCAATGCAAAACTCAACCCTACCCCA
GGCAGCAATGCTATCTCAGATGTCCCAGGAGAGAGGAGTACAGCCAGCACCTTTCCTACAGACCCAGTTT
CCCCATTGACAACCACCCTCAGGCTTGGACACCACAGCTCTGCTGCCTTACCTGGACGCACCTCCAACAC
CACCATCACAGCGAACACCTCAGATGCCTACCTTAATGCCTCTGAAACAACCACTCTGAGCCCTTCTGGA
AGCGCTGTCATTTCAACCACAACAATAGCTACTACTCCATCTAAGCCAACATGTGATGAAAAATATGCAA
ACATCACTGTGGATTACTTATATAACAAGGAAACTAAATTATTTACAGCAAAGCTAAATGTTAATGAGAA
TGTGGAATGTGGAAACAATACTTGCACAAACAATGAGGTGCATAACCTTACAGAATGTAAAAATGGGTCT
GTTTCCATATCTCATAATTCATGTACTGCTCCTGATAAGACATTAATATTAGATGTGCCACCAGGGGTTG
AAAAGTTTCAGTTACATGATTGTACACAAGTTGAAAAAGCAGATACTACTATTTGTTTAAAATGGAAAAA
TATTGAAACCTTTACTTGTGATACACAGAATATTACCTACAGATTTCAGTGTGGTAATATGATATTTGAT
AATAAAGAAATTAAATTAGAAAACCTTGAACCCGAACATGAGTATAAGTGTGACTCAGAAATACTCTATA
ATAACCACAAGTTTACTAACGCAAGTAAAATTATTAAAACAGATTTTGGGAGTCCAGGAGAGCCTCAGAT
TATTTTTTGTAGAAGTGAAGCTGCACATCAAGGAGTAATTACCTGGAATCCCCCTCAAAGATCATTTCAT
AATTTTACCCTCTGTTATATAAAAGAGACAGAAAAAGATTGCCTCAATCTGGATAAAAACCTGATCAAAT
ATGATTTGCAAAATTTAAAACCTTATACGAAATATGTTTTATCATTACATGCCTACATCATTGCAAAAGT
GCAACGTAATGGAAGTGCTGCAATGTGTCATTTCACAACTAAAAGTGCTCCTCCAAGCCAGGTCTGGAAC
ATGACTGTCTCCATGACATCAGATAATAGTATGCATGTCAAGTGTAGGCCTCCCAGGGACCGTAATGGCC
CCCATGAACGTTACCATTTGGAAGTTGAAGCTGGAAATACTCTGGTTAGAAATGAGTCGCATAAGAATTG
CGATTTCCGTGTAAAAGATCTTCAATATTCAACAGACTACACTTTTAAGGCCTATTTTCACAATGGAGAC
TATCCTGGAGAACCCTTTATTTTACATCATTCAACATCTTATAATTCTAAGGCACTGATAGCATTTCTGG
CATTTCTGATTATTGTGACATCAATAGCCCTGCTTGTTGTTCTCTACAAAATCTATGATCTACATAAGAA
AAGATCCTGCAATTTAGATGAACAGCAGGAGCTTGTTGAAAGGGATGATGAAAAACAACTGATGAATGTG
GAGCCAATCCATGCAGATATTTTGTTGGAAACTTATAAGAGGAAGATTGCTGATGAAGGAAGACTTTTTC
TGGCTGAATTTCAGAGCATCCCGCGGGTGTTCAGCAAGTTTCCTATAAAGGAAGCTCGAAAGCCCTTTAA
CCAGAATAAAARCCGTTATGTTGACATTCTTCCTTATGATTATAACCGTGTTGAACTCTCTGAGATAAAC
GGAGATGCAGGGTCAAACTACATAAATGCCAGCTATATTGATGGTTTGAAAGAACCCAGGAAATACATTG
CTGCACAAGGTCCCAGGGATGAAACTGTTGATGATTTCTGGAGGATGATTTGGGAACAGAAAGCCACAGT
TATTGTCATGGTCACTCGATGTGAAGAAGGAAACAGGAACAAGTGTGCAGAATACTGGCCGTCAATGGAA
GAGGGCACTCGGGCTTTTGGAGATGTTGTTGTAAAGATCAACCAGCACAAAAGATGTCCAGATTACATCA
TTCAGAAATTGAACATTGTAAATAAAAAAGAAAAAGCAACTGGAAGAGAGGTGACTCACATTCAGTTCAC
CAGCTGGCCAGACCACGGGGTGCCTGAGGATCCTCACTTGCTCCTCAAACTGAGAAGGAGAGTGAATGCC
TTCAGCAATTTCTTCAGTGGTCCCATTGTGGTGCACTGCAGTGCTGGTGTTGGGCGCACAGGAACCTATA
TCGGAATTGATGCCATGCTAGAAGGCCTGGAAGCCGAGAACAAAGTGGATGTTTATGGTTATGTTGTCAA
GCTAAGGCGACAGAGATGCCTGATGGTTCAAGTAGAGGCCCAGTACATCTTGATCCATCAGGCTTTGGTG
GAATACAATCAGTTTGGAGAAAGAGAAGTGAATTTGTCTGAATTACATCCATATCTACATAACATGAAGA
AAAGGGATCCACCCAGTGAGCCGTCTCCACTAGAGGCTGAATTCCAGAGACTTCCTTCATATAGGAGCTG
GAGGACACAGCACATTGGAAATCAAGAAGAAAATAAAAGTAAAAACAGGAATTCTAATGTCATCCCATAT
GACTATAACAGAGTGCCACTTAAACATGAGCTGGAAATGAGTAAAGAGAGTGAGCATGATTCAGATGAAT
CCTCTGATGATGACAGTGATTCAGAGGAACCAAGCAAATACATCAATGCATCTTTTATAATGAGCTACTG
GAAACCTGAAGTGATGATTGCTGCTCAGGGACCACTGAAGGAGACCATTGGTGACTTTTGGCAGATGATC
TTCCAAAGAAAAGTCAAAGTTATTGTTATGCTGACAGAACTGAAACATGGAGACCAGGAAATCTGTGCTC
AGTACTGGGGAGAAGGAAAGCAAACATATGGAGATATTGAAGTTGACCTGAAAGACACAGACAAATCTTC
AACTTATACCCTTCGTGTGTTTGAACTGAGACATTGGAAGAGGAAAGAGTCTCGAACTGTGTACCAGTAC
CAATATACAAACTGGAGTGTGGAGCAGCTTCCTGCAGAACGCAAGGAATTAATCTGTATGATTCAGGTCG
TCAAACAAAAACTTCCCCAGAAGAATTCCTCTGAAGGGAACAAGGATCACAAGAGTACACGTCTACTCAT
TCACTGCAGGGATGGATCTCAGCAAACGGGAATATTTTGTGCTTTGTTAAATGTCTTAGAAAGTGCGGAA
ACAGAAGAGGTAGTGGATATTTTTCAAGTGGTAAAAGCTCTACGCAAAGCTAGGCCAGGCATGGTTTCCA
CATTCGAGCAATATCAATTCCTATATGACGTCATTGCCAGCACCTACGCTGCTCAGAATGGACAAGTAAA
GAAAAACAACCATCAAGAAGATAAAATTGAATTTGATAATGAAGTGGACAAAGTAAAGCAGGATGCTAAT
TGTGTTAATCCACTTGGTGCCCCAGAAAAGCTCCCTGAAGCAAAGGAACAGGCTGAAGGTTCTGAACCCA
CGAGTGGCACTGAGGGGCCAGAACATTCTGTCAATGGTCCTGCAAGTCCAGCTTTAAATCAAGGTTCATA
G

### EXAMPLES

### Example 1

### Materials & Methods

### Patient Samples

[0254] Informed consent was obtained in accordance with the Declaration of Helsinki and with approval from UK Ethics Committees (Oxford 06\Q1606\110; Greater Glasgow and Clyde 10/S0704/2). Mononuclear cells (MNC) were isolated by Histopaque density gradient within 24-48 hours of collection. CD34+ cells were purified using the CD34 Microbead Kit/MACS separation columns (Miltenyi Biotec).

### NSG Xenograft Assay

[0255] Experiments were performed in accordance with UK Government Home Office approved Project License 30/2465. 8-14 week old female NSG mice were irradiated 100-125 cGy twice, 4 hr apart, followed 24 hr later by intravenous tail vein injection of myeloid BP-CML stem/progenitor cells. To abrogate antibody-mediated cell clearance, NSG were injected intraperitoneally with 200 mg of anti-CD122 antibody or IVIG (1 mg/gram body weight). Peripheral blood or bone marrow engraftment was monitored by blood sampling from 12 weeks onwards. Mice were culled for bone marrow harvesting between 16 and 22 weeks. Human myeloid (hCD45+CD33+CD19−) or B-lymphoid (hCD45+CD33−CD19+) engraftment was analysed by FACS and defined as ≥0.1% of live mononuclear cell (MNC) gate. Leukaemic engraftment was confirmed by karyotypic and BCR-ABL analysis.

### Flow Cytometric Analysis and Sorting

[0256] Different antibody panels were used for FACS purification of cells for injection into immunodeficient mice (FIGS. 2 and 3) and for quantitation of stem/progenitor sizes in primary human samples (FIG. 1). For FACS purification, additional antibodies (anti-CD2, anti-CD4, anti-CD8, anti-CD235a—glycophorin) against lymphoid (to avoid GvHD) and erythroid cells (to reduce ineffective cell number injected) but not myeloid cells (anti-CD14 and anti-CD16) were used. For FIG. 1, cells were stained with lineage cocktail-FITC (CD3 (MϕP9), 14 (3G8), 16 (NCAM16.2), 19 (SJ25C1), 20 (SK7), 56 (L27)) and CD34-PerCP (8G12), CD38-V450 (HIT2), CD45RA-APC H7 (HI100), CD90-PE Cy7 (5E10) and CD123-APC (7G3). All antibodies were from BD (Oxford, UK). In FIGS. 2 and 3, the following antibodies were used; lineage cocktail: anti-CD2 (RPA-2.10), CD3 (HIT3a), CD4 (RPA-T4), CD8 (RPA-T8), CD19 (HIB19), CD20 (2H7) and GPA (GA-R2) (all from e-Bioscience Hatfield UK). Following this, cells were stained with QDOT605 conjugated goat F(ab′) anti-mouse IgG (H+L, Invitrogen, Paisley UK). Cells were then washed and subsequently stained with FITC-conjugated anti-CD38 (HIT2, e-Bioscience), PE-conjugated anti-CD45RA (H1100, e-Bioscience), PerCP-conjugated anti-CD34 (581, BioLegend London UK), PECy7-conjugated anti-CD123 (6H6, e-Bioscience) and biotin-conjugated anti-CD90 (5E10, e-Bioscience). Finally cells were stained with a streptavidin-conjugated APCeFluor 780 (e-Bioscience). All samples were double sorted where cell numbers permitted (95% of sorts).

### FISH Analysis

[0257] FACS-sorted cells were incubated at 37° C. for 15 minutes in a hypotonic solution (0.075M KCl). Cells were then centrifuged at 1500 rpm for 5 minutes and resuspended in fixative (3:1 methanol: acetic acid), added in a dropwise manner whilst continuously vortexing. Cells were incubated at room temperature for 5 minutes and centrifuged at 12000 rpm for 2 minutes. The cells were washed twice in fixative (12000 rpm for 2 minutes) before re-suspension in 1 ml fresh fixative. 3 μl of fixed cell suspension was dropped onto a glass slide, air-dried and cell density checked using a phase contrast microscope. Probe mixes were prepared according to manufacturer's instructions and 2 μl added and covered with a coverslip sealed with rubber solution. The slide was placed in a hybridization chamber, heated to 75° C. for 5 minutes and then 37° C. overnight. Cover slips were removed and slides washed in a 0.4×SSC/3% NP40 wash buffer at 72° C. for two minutes and then a 2×SSC/1% NP40 wash buffer at room temperature for two minutes. DAPI mounting medium (Vector Laboratories, Peterborough UK) was applied to the slide, a coverslip attached and the slide analysed using a Zeiss Axio Imager Z2 and Cytovision software from Leica Biosystems. For multi-probe studies, probes to BCR-ABL fusion and deletions of p53 and iso(17)q were custom designed and manufactured (Empire Genomics) with BCR fluorescently labelled in green, ABL in Texas Red, TP53 in Gold and MPO (iso17q) in Aqua. All probes were used following the manufacturer's instructions. Standard BCRABL pattern is R1G1F2. We also observed 2 patterns of atypical BCR-ABL profiles: R1G1F3 and R1G1F1.

Immunophenotypic Analysis of CML Progression from CP to Myeloid BP

[0258] We first compared the size of different immunophenotypic haematopoietic stem and progenitor (HSPC) compartments: HSC (Lin-CD34+CD38-CD90+CD45RA−), MPP (Lin-CD34+CD38−CD90−CD45RA−), LMPP (Lin-CD34+CD38−CD90−CD45RA+), CMP (Lin-CD34+CD38+CD45RA−CD123+), GMP (Lin-CD34+CD38+CD45RA+CD123+) and megakaryocyte-erythroid progenitor (MEP; Lin-CD34+CD38+CD45RA−CD123−) in normal, CP-, accelerated phase (AP)- and myeloid BP-CML (FIG. 1A-E). When compared to normal, CP- and AP-CML (FIG. 1A-C respectively), in myeloid BPCML there are two distinct immunophenotypic patterns: a dominant MPP-like/CMPlike phenotype (FIG. 1D) and a dominant LMPP-like/GMP-like phenotype (FIG. 1E). This results in striking differences in the sizes of cellular sub-compartments within the Lin-CD34+ population between normal, CP-, AP- and myeloid BP-CML (FIG. 2A-B). LMPP-like cells were <0.5% of Lin-CD34+ in normal, CP- and AP-CML, but significantly increased with progression to LMPP-like/GMP-like BP-CML (18.1%, p<0.01). GMP-like cells decreased as disease progressed from normal and CP- to AP-CML (p<0.05), but significantly increased on progression to LMPP-like/GMP-like BP-CML (p<0.05). The MEP fraction was significantly expanded in CP and AP-CML (p<0.01), but significantly decreased on progression to BP-CML (p<0.001) (FIG. 2A-B). In contrast the size of the immunophenotypic HSC compartment remained relatively constant despite disease progression. In myeloid BP samples, with what we have termed an MPP-like/CMP-like profile, the overall percentage of CMP-like and MPP-like cells was not significantly increased.

[0259] In summary, we demonstrate dynamic changes in size of the different immunophenotypic HSPC-like compartments with disease progression in CML and heterogeneity of HSPC-like populations in myeloid BP-CML. As a next step we proceeded to functionally characterize the different HSPC-like compartments in myeloid BP-CML.

### LSC Function in Myeloid BP-CML

[0260] To identify which cell compartments contain leukaemia-propagating function, we purified HSPC-like populations from 5 BP-CML patient samples (COL091, COL091R CML371, CML002 and HER002) (FIG. 3A). For patient COL091 two samples were tested, the initial myeloid BP diagnostic sample and a follow-up sample at relapse (COL091R), 9 months after therapy with palliative oral 6-mercaptopurine chemotherapy. Samples were tested for engraftment in primary immunodeficient murine recipients (FIG. 3B). Human myeloid-only leukemic engraftment was detected in 4 of 5 samples (FIG. 3C) by immunophenotype and FISH analysis for leukaemia-associated mutations (see below).

[0261] Two engrafting samples had large MPP-like/CMP-like compartments (COL091, CML371). In samples with expanded MPP-like/CMP-like populations, HSC-like, MPP-like, CMP-like and MEP-like populations reproducibly engrafted.

[0262] Two engrafting samples had expansion of LMPP-like/GMP-like compartments (COL091R, CML002). In both samples, all HSPC-like populations that could be purified engrafted in primary recipient mice (FIG. 3C). Since varying numbers of cells were available and thus injected from each immunophenotypic compartment we considered whether failure to engraft primary recipients could be explained by injection of low cell numbers. In all 4 samples there were examples of engrafting populations (black dots) that had been injected at lower cell numbers compared to non-engrafting populations (white-centred dots) (FIG. 3D). Failure to engraft may have occurred either because: (i) LSC frequency was low in non-engrafting populations; cell numbers did not permit establishing LSC frequencies by limiting dilution analysis, (ii) cell populations were too small to purify (e.g. MEP-like compartment in COL091); (iii) we had insufficient cell numbers to inject into several mice (e.g. GMP-like compartment in CML371).

[0263] For 2 samples (COL091 and CML002), we purified cell populations from primary engrafted subpopulations (FIG. 4A) and analysed engraftment in secondary recipient mice (FIG. 4B). There were two aims of the experiment. First, we wanted to establish if patient HSPC populations could serially engraft leukaemia. For COL091, HSC-like, CMP-like and GMP-like populations serially propagated leukaemia (i.e. had LSC function). For sample CML002, both the LMPP- and GMP-like populations from the patient serially engrafted. Collectively, these data demonstrate multiple LSC populations in myeloid BP-CML.

[0264] Second, we asked if the leukemic HSPC populations were organized in a hierarchical manner akin to the hierarchy seen in normal haemopoiesis. In COL091, the HSC-like population from the patient generated an HSC-like population and downstream progenitor populations (FIG. 4A and B) but only the HSC-like and CMP-like populations from the primary mice engrafted secondary mice. Furthermore, when the CMP-like population from the patient was injected into primary mice, it generated an MPP-like population in addition to CMP-like and GMP-like progenitor-like populations. Both MPP-like and CMP-like populations from primary mice were able to engraft secondary recipients. However, although GMP-like cells from the patient generated CMP- and GMP-like populations, only the GMP-like cells from primary mice were able to engraft secondary mice. From patient CML002 both LMPP-like and GMP-like cells generated both LMPP-like and GMP-like populations in primary mice that could be purified and that were transplantable in secondary recipients. Based on these immunophenotypic analyses of engrafting populations, one interpretation of the data is that the leukaemia is not hierarchically organized.

### Analysis of Clonal Evolution in HSPC Populations in BP-CML

[0265] Clonal evolution, often associated with acquisition of additional cytogenetic abnormalities (ACAs) beyond t(9:22), is a marker of disease progression to AP- and BP-CML. Thus, we wanted to understand in which cell compartments ACAs were present in BP-CML by identifying clonal structures in myeloid BP-CML patients. Furthermore, given the multiple LSC populations in BP-CML, we asked if there was a correlation between LSC function and cytogenetic heterogeneity. Finally, we asked how accurately clonal structure in patients was captured in the experimental immunodeficient mouse model.

[0266] Karyotypic analysis of patient cells identified abnormalities in addition to t(9:22) in 4 patient samples (COL091, COL091R, CML371 and CML002) (Table 1). In ¾ cases (COL91, COL091R and CML002) we detected the ACAs by multicolor FISH at a level of >5%. Thus, we examined clonal structure in these cases in all available HSPC-like cell subpopulations from patient samples (FIG. 5A-C i-iii) and engrafted mice (FIG. 6A-C). For some subpopulations, and in some engrafted mice, insufficient cells were available for analysis.

[0267] Table 1 shows a) patient characteristics, and b) detailed cytogenetic analysis for the indicated patients obtained at diagnosis of BP-CML.
[0268] a)

| | | | | Disease |
|---|---|---|---|---|
| UPN | Age | Sex | WCC (×10⁹/L) | phase |
| CML264 | 61 | M | NK | Chronic |
| CML194 | 40 | F | 150 | Chronic |
| CML109 | 56 | F | NK | Chronic |
| CML259 | NK | NK | NK | Chronic |
| CML110 | 46 | F | NK | Chronic |
| CML111 | 35 | F | NK | Chronic |
| CML373 | 42 | F | 382 | Chronic |
| CML339 | 26 | F | 295 | Chronic |
| CML294 | 38 | F | 294 | Chronic |
| CML273 | 50 | F | 308 | Chronic |
| CML340 | NK | NK | NK | Chronic |
| CML341 | 48 | M | 231 | Chronic |
| CML332 | 54 | F | 132 | Chronic |
| CML343 | 39 | M | 48 | Chronic |
| CML347 | 27 | F | 386 | Chronic |
| CML112 | 32 | M | >100 | Accelerated |
| CML185 | 46 | M | >100 | Accelerates |
| CML239 | 62 | M | NK | Accelerated |
| CML415 | 71 | F | 135 | Accelarated |
| CML001 | NK | F | NK | Myeloid Blast |
| CML002 | 65 | M | NK | Myeloid Blasi |
| CML371 | 40 | M | 51 | Myeloid Blast |
| COL091 | 78 | M | NK | Myeloid Blast |
| COL091R | 78 | M | NK | Myeloid Blast |
| HER002 | 65 | F | NK | Myeloid Blast |
| LIV1723 | 36 | F | NK | Myelosd Blast |
| LIV1724 | 33 | M | NK | Myeloid Blast |
| LIV2616 | 43 | F | NK | Myeloid Blast |
| LIV2225 | 65 | F | NK | Myeloid Blast |
| LIV2397 | 42 | M | NK | Myeloid Blast |

| Patient | Karyotype |
|---|---|
| COL091 | 46, XY t(9; 22) (q34; q11), del(16) (q22q23) [8], |
| | 46, XY t(9; 22) (q34; q11), del(16) (q22q23), i(17) (?q10) [2] |
| COL091R | 46, XY t(9; 22) (q34; q11), del(16) (q22), i(17) (q10) [4] |
| CML371 | 46, XY t(9; 22) (q34; q11) [39]/ |
| | 46, idem, del(7)(p11)[5]/46, XY[6] |
| CML002 | 46, XY, t(9; 22) (q34; q11)[15] |
| | 46, idem, del(17)(p1?3) [15] |

[0269] Taking data from all three patient samples and engrafted mice together, the following points emerge. First, in all three patients the ACAs involved heterozygous loss of chromosome 17p (detected with a TP53 probe) and in 2/3 cases isochromosome 17%, consistent with previous data showing chromosome 17 aberrations are common in CML clonal evolution. Second, in all three cases, ACAs are detected in multiple immunophenotypic compartments regardless of which immunophenotypic compartments are expanded (FIG. 5A-Ci-iii). Third, in all three cases there were differences in clonal composition of cells in the patient and in the mice. For example, in the patient sample COL091, all three clones in patient cells had a standard BCRABL FISH signal (standard BCR-ABL, standard BCR-ABL plus 17p13 loss and standard BCR-ABL plus 17p13 loss with isochromosome 17q) (FIG. 51B). In contrast, in secondary transplanted mice, clones with an aberrant BCR-ABL signal were detected (FIG. 6B). In one of these mice the aberrant BCR-ABL clones comprised 90% of engrafted cells. In the relapsed sample COL091R, there was evidence of clones in the transplanted mice not detected in the patient sample (FIG. 6C).

[0270] We have fully characterized the leukaemia stem and progenitor cell populations in myeloid BP-CML. We demonstrated that in myeloid BP-CML the sizes of the immunophenotypic stem/progenitor compartments are heterogeneous and often show expanded progenitor populations. Serial transplantation indicated that LSCs can reside in any of the immunophenotypically-defined HSPC populations. Concordantly, we showed that ACAs are also present in the multiple immunophenotypic HSPC-like populations with LSC potential.

[0271] In summary, our examples conclusively showed that functional LSCs reside in multiple immunophenotypically distinct HSPC populations in myeloid BP-CML. This is associated with clonal evolution in all HSPC compartments, including the HSC-like populations.

### Example 2

### Identification of Differentially Expressed Genes in CMPs, MPPs, LMPPs, and GMPs Preparation RNA-Sequencing Libraries

[0272] ˜100 highly purified haematopoietic stem and progenitor cell (HSPC) populations from bone marrow samples obtained from healthy and leukaemic donors were sorted directly into lysis buffer containing RNAse inhibitor (Clontech St Germain-en-Laye France) and were stored at −80° C. before further processing. cDNA synthesis was done with Smarter Ultra low input RNA kit vi (Clontech). Illumina libraries were generated using a Nextera XT DNA sample preparation kit and Index Kit (Illumina Chesterford UK). Library size and quality were checked using Agilent High-Sensitivity DNA chip with Agilent Bioanalyser (Agilent Technologies Stockport UK). The concentration of indexed libraries was determined using a Qubit High-Sensitivity DNA kit (Invitrogen Loughborough, UK). Libraries were pooled to a final concentration of 5-14 nM and were sequenced on an Illumina HiSeq 4000 paired-end 75-bp reads.

### Bioinformatic Analysis

[0273] For quality control, raw reads were assessed using Fastqc. Reads were trimmed using Trimmomatic for Nextera transposase sequences and over-represented sequences. Pseodoalignment was then carried out using Kallisto and coding genes were quantified. Generated counts tables were then processed in DESeq2. Lowly expressed genes (with fewer than 5 counts across all samples) were removed and VST normalisation used.

### MPP, CMP, GMP & LMPP Cell Surface Markers

[0274] To detect differentially expressed genes in a population a Wald test was used, comparing the population of interest to all other HSPC populations. Significantly upregulated genes were identified using a p-adjusted value of less than 0.05. These genes were filtered for cell surface markers using the human surfaceome described by Prof. Terence Rabbitts (http://www.imm.ox.ac.uk/complete-surfaceome-spreadheets).

[0275] Genes associated with the membrane and with a gold or silver ranking were taken forward as cell surface markers of interest.

[0276] Expression data heat maps for each of the cell types compared to progenitor cells and HSCs are shown in FIGS. 7-10.

[0277] Results are indicated in the table below together with Log 2 fold change:

| | | Log2 Fold | P Adjusted |
|---|---|---|---|
| Cell Type | Gene | Change | Value < 0.05 |
| CMP | MS4A2 | 3.67732121 | 5.43E−07 |
| MPP | MLNR | 2.637313759 | 0.006348268 |
| | TIGIT | 2.618617415 | 0.013352476 |
| | CNGA1 | 2.365903308 | 0.023538679 |
| LMPP | MME | 2.996524856 | 9.71E−05 |
| GMP | SIRPB2 | 4.612995245 | 5.94E−12 |
| | PRRG4 | 2.157661029 | 1.24E−05 |
| | VSTM4 | 1.2431042 | 0.001337256 |
| | TMEM107 | 1.412986069 | 0.006136896 |
| | NETO2 | 1.978572835 | 0.006455439 |
| | CSF1R | 2.60699985 | 0.014350009 |
| | ADRB2 | 2.640170514 | 0.015261082 |
| | TLR2 | 2.57433613 | 0.015582145 |
| | FUT4 | 2.22526366 | 0.015675858 |
| | MGST1 | 1.809926672 | 0.02335672 |
| | CSF3R | 2.122162444 | 0.027773312 |
| | HLA-B | 1.189178651 | 0.028663457 |
| | ITGA10 | 1.570139712 | 0.030416667 |
| | SLC26A8 | 1.484785137 | 0.031823301 |
| | SIRPB1 | 1.656054158 | 0.034538793 |
| | RAET1E | 1.805128796 | 0.036933704 |
| | ST3GAL6 | 1.708125795 | 0.046048877 |
| | LAMP1 | 1.270162443 | 0.046552655 |
| | LGALS1 | 2.293728743 | 0.048539636 |
| | ILDR1 | 1.709756893 | 0.048539636 |

### LSC Cell Surface Markers

[0278] To detect differentially expressed genes in leukaemic samples a Wald test was used, comparing the normal (non-AML) LMPP and GMP with the leukaemic LMPP and GMP. Significantly upregulated genes were identified using a p-adjusted value of less than 0.05. These genes were filtered for cell surface markers as described above.

[0279] Results for the expression analysis in leukaemic LMPPs and GMPs are provided below:

| | Log2 Fold | P Adjusted |
|---|---|---|
| Gene | Change | Value < 0.05 |
| MME | −3.2649 | 6.53E−12 |
| IFITM1 | 2.791351 | 8.30E−07 |
| CMTM6 | 1.681428 | 1.95E−06 |
| CD55 | 1.885661 | 5.65E−06 |
| SLC35F5 | 1.654947 | 5.93E−06 |
| CNTNAP2 | −1.79013 | 9.33E−06 |
| PIGO | −2.12866 | 2.63E−05 |
| SHH | −3.1853 | 2.77E−05 |
| AQP11 | 3.059803 | 4.49E−05 |
| PCDHB9 | 1.283279 | 7.89E−05 |
| RHOA | 1.085482 | 0.000108 |
| TMEM231 | −1.79578 | 0.000119 |
| SAMD8 | 1.865806 | 0.00018 |
| ABCA13 | −2.17155 | 0.00019 |
| TAPT1 | 1.656336 | 0.000339 |
| NFASC | −0.94015 | 0.000529 |
| LEPROT | 1.581665 | 0.000531 |
| MCOLN2 | −1.57306 | 0.000556 |
| IL6ST | 2.314336 | 0.000567 |
| EMP3 | 1.664649 | 0.000988 |
| CD83 | 2.133856 | 0.001057 |
| LPAR6 | 2.683808 | 0.001064 |
| PIEZO2 | 2.461111 | 0.001372 |
| DERL1 | 0.958172 | 0.001398 |
| IL1RAP | 1.978059 | 0.001677 |
| LPAR4 | 2.597562 | 0.001794 |
| SERPINE2 | −2.04617 | 0.001929 |
| PKN2 | 1.063161 | 0.002199 |
| VAMP2 | 0.984519 | 0.002342 |
| TMCO3 | 1.125892 | 0.002733 |
| VAMP7 | 1.383903 | 0.002959 |
| PTPRC | 1.277407 | 0.003545 |
| TFRC | 1.521823 | 0.004709 |
| ILDR1 | −1.64782 | 0.005209 |
| PDIA3 | 1.248449 | 0.006379 |
| AIMP1 | 0.785261 | 0.006997 |
| GPR63 | −1.43823 | 0.00715 |
| CCR7 | −2.4021 | 0.007367 |
| ATG9B | −2.19614 | 0.008306 |
| SLC9B1 | 1.863979 | 0.00832 |
| CD99 | 1.247244 | 0.008614 |
| LRP1 | −1.27428 | 0.0096 |
| UBR4 | 0.602577 | 0.00976 |
| ATP6AP2 | 0.706512 | 0.011494 |
| TEX10 | 1.007287 | 0.011865 |
| CNGB1 | 1.14078 | 0.013097 |
| SPN | −0.92855 | 0.014206 |
| PILRB | −1.41094 | 0.014775 |
| JAM2 | −1.7028 | 0.014854 |
| PDGFA | 1.755207 | 0.014927 |
| CD46 | 0.761361 | 0.016004 |
| NDUFB1 | −0.82098 | 0.019129 |
| GYPE | −2.25737 | 0.020455 |
| SLC12A8 | 1.261887 | 0.022333 |
| SLC2A14 | 1.485765 | 0.023896 |
| RNF19B | 1.704733 | 0.023992 |
| SPCS1 | 0.715126 | 0.026233 |
| SLC35F6 | −1.26606 | 0.027562 |
| CD36 | 1.787822 | 0.027672 |
| ITM2B | 0.883228 | 0.030193 |
| GLG1 | −1.20068 | 0.031632 |
| SMIM24 | −0.96097 | 0.032408 |
| TMEM50A | 0.717638 | 0.033782 |
| HSPA5 | 1.404673 | 0.035466 |
| ITGAX | 1.336632 | 0.036142 |
| SLC24A2 | −0.76929 | 0.036328 |
| SLC2A3 | 1.571859 | 0.038215 |
| RAB11FIP3 | −1.54185 | 0.039326 |
| IL18R1 | 1.839034 | 0.04168 |
| CCDC47 | 1.107439 | 0.043935 |
| FZD4 | 0.893479 | 0.044161 |
| SHISA9 | 0.559108 | 0.044648 |
| SORCS1 | 1.904703 | 0.045901 |
| CLIC4 | 1.359124 | 0.046657 |

[0280] Fold changes of less than 0 indicate reduced expression (downregulation) when compared to the non-leukaemic (e.g. non-LSC) reference standard. Fold changes of more than 0 indicate increased expression (upregulation) when compared to the non-leukaemic (e.g. non-LSC) reference standard.

[0281] A heat map is provided in FIG. 11 showing expression data.

[0282] All publications mentioned in the above specification are herein incorporated by reference. Various modifications and variations of the described methods and system of the present invention will be apparent to those skilled in the art without departing from the scope and spirit of the present invention. Although the present invention has been described in connection with specific preferred embodiments, it should be understood that the invention as claimed should not be unduly limited to such specific embodiments. Indeed, various modifications of the described modes for carrying out the invention which are obvious to those skilled in biochemistry and biotechnology or related fields are intended to be within the scope of the following claims.

The application's sequence listing, which the Patent Office published only in electronic form, follows.

SEQUENCE LISTING (780 sequences)

SEQ ID NO: 1 - DNA, 159606 bp, Homo sapiens
acattcctactgagtatgacgaatggttgttgatggttatcactggagattgaaaactgggattcctttttcaccaggaattggtgcctaccatggctggggatacacagtgatggatttgtgacttgctcctctgaaagctggcccaagggtgtacagcatatgaatgtgggggagtttacactacacacgctcttggctgtaagtagttgagtttcattttttaaatttattactaactgcttaactttagttgaagcctgagaatcttatctacactgatataatttatgctgttagcatttcactttatgcagctcttaatccactcccatgccccaacttgatgcttaatttggtgtatgtattgatttatgttgttttcacaagaataataaatagagctggcagtctgaagagaggacaataaagttgtaaataaaggaggggagtaatgccattcaaccttaactttatatattgatatcattccactttttctgctatattataactgatattatcaacatgtgtctattttattgatactttttgcactgatcttgccctgatttggtcatttttggtgaacaattttagaaataagagcataacatagaaaaagggacatctgtcgtagagatacatttcctataaaggtgcatacttatgtgcacataaaattatatatgaatgcagaaaatgtctacaatgaaaaataaaaatggtcctgcctatggtagaattactgctgcaggaagtagaggggaattggggtgatatctttggaagcataggaaggaccatcaaacaactcaaaaccatgccacatgaaaaatagctgaaaaagtgtgattttttcaacttggagaaaatagacccactgaacttaatagctgtctccaaatatgtgaagtctgtctcgcagaaagatcaggcttgttaggtagggccccaggggcagataatgagggatgcatcttcctgaaaggtggagcagagtatctgcaacactcaaacctcttactctggctctgagaggaaaaacaccacccagggtgcagcccagcctttgccactatatgcctgccaatggggaggacacatctactcagccaactgtgccagtgaccagagataaactctgatgggtttgtgctttattcttctaaaattggtgtcagggtgcacagtaaatgaattctggagaactaggggaaatttgtaggcaaaagtagagacaaagtatggatcactttgggaggccgaggtgggtggatcacttgaggttaggaattcgagaccagcctggtcagcaaagtgaaaccccatctctacaaaaatacaaaaattagctgggcatcgtggcaggcacctgtaatcccagctactcaggaggctgaaccaggagaatcacttgaacccaggaggcagaggttgcggtgagccgagatagtgccattgcactccagcctgggagacagagcgagaccctgtctcaaaaaaaaaaaaaagtagagacaaagtagataccaagtggtatcagattttttctttctttctttctttttttttttttttttttttgagacagagtttcactctgtcgcccaggctggagtgcaatggcacgatctcggctcactgcaacctctgcctcttggattcaagcaattctctcctgcctcagcctcccaagtagctgggattacaggtgcccgccaccatacccagctaatttttatatttttagtagagatggggtttcaccatgttggccaggctggtcttgaactcctgacctcaagttatctgcctggtatcagatttttgcagactaaaagatatcaggtatcaggttttagcaaaccatagaaatattaataatcctaaaaaaaagccaaacacagaaagaaagtacagattctgcccctcttttgccagtgtagccatggacattctaacagcagttacattgatctgttctgctataggcatgctccatgcatttcccttgggaaactgaagcaaacaggattgaatgcttagggtttgtttgtttgttggggtaggggggtgggtggagttgttttaaggaacactcccagctcagtgtccatttatctattcattgaggccctcacaacttgtcagtcaggaaactcaaatgggttaaaaaaatgaactctggagccaaggtgctagggtttaaatcccacttctaccactgaatggctttttttattgttattatcactagtccctcaaggtcaaagacagagttagatcactacttccctgtaagaaaaataagccttggctgagcgcagtggctcacacctgtaatcccagcactttgggaggccgaggtgggtggatcacctgaagttaggaattcaagaccagcttgggcaacatggtgaaatcccgtctctactaaaattgcaaaaattagctgggtgtggtggcgcgtgcctttcatcccagctacttgggagcctgaggcataagaatcgcttgaaccccacaggcagaggttgtactgagccgagatcatgtcactggactccagactgggtgacagtgagactctgtcccattccccccacctcccccagaaaagcaagcaagaaagaaaaagaagcctcttaagtaataccctcatccagctatcctagtatctgagtgtgattcttcataaataaagctgtagaaacacaaatgtccagaagcaggttgatgatgtttcctaacctctttttcctttatgtctttaaacaaaacaagagtttacaatagatttgctactttattctgtctatctactcagacagtaataataattttaacaagcattgattcaaatattaaattacccaatagatctatttagcctgggtattttgcaagcacctcaatttcaacatcccagaaactgaagtctcaagcttctctttgcatttctaatatttgtcaatatacttagacatttccaaaatcatttttggtttggcagtgctaccctgctaaatttttctcaaatccatctcttccttggactcatttcagaactgccctgagtcagggcttcttgatatattgcctggattcctgctctaatctctcaatgcttcctgtctctctcttctcttgtacgtaacacttccctcatctacacaaccataaggaagagctctctaaaatgcagatctgatcttacactcctatttcctgtaaagtctaaagccctgggcaaggtttttatggttcttcaaggttccaatttatctttctagtcctgctcactccctgctgtgcttgttcagccttaaaggctattagcggatttctcccaaccaccttccctgccctcagcacatacagagtgccagggcccttctgggcctttgctcatgctacttgctttatctgagtgctcttcctcctttccctgatctgaaaacctctattcaatcttaaaggcccagctcaaatattactgttgttaaatttctttgtgttaggatttcttctatagaatcccttaacagtaggcttagatagaattttagcattttaatagcattaaaggtataactggctaaaaggcaacagattaaaaacacacaaatagtttactctgacaatgagattaggtgctttttaaactatatgatttatagttttatgcattttaaccttcacagctagcccaatcctaagcacataatagatactcaaaaagtttgttgactgaataaatgaaataaatcttttacctcaaatatattaatatttttacttttcatcagcacaatcaaatagagatgtacttttttgccttgtattatctgtttactaatttctagcaatctattcatgcatgggtaaatgtaaccctaaagagagaattctgccttctttttaaaatgggaatggactcagtgaaaggaaaggggtgaggaccatcatttattcattcatttgatgcctattatcatgcacctttctaggctctggagatttagtgaaacagacaacatttctactctccaggatcttctcttctataaagataggacagaagagaaacaagtaaacagacaaataagttaattgtgtttagtgataaggactaagagaaccataaaatggattaatgtggcacaacctaattagaaatggggaatacatgagattgggtggttaccttgccaatgaagtgagagctgcatgttgaaaggagccagccatgtaataatctgggaatagagaggacagttagggtaaagcctaaggacaggagtgaggaaaaggcaggaggcaatgtggctgctcattattagcaaggggatcacctggtgtagcagatgctgtactacctgctttccacatttctacgtttatgtctgattatatcttcagaaggctagccacactttatagatggaggaacagatcatcagagcaagatagcagacttttccaagtcttgtatcttggaaatgaaaggtgtaattattctaaatgaattctgactgtctcagaagtttaggatcaaacgtcaggctaaagtaaaatgatttttggtagcattacatctttattgtcaattgaaatgtcaacctaaagtaatcaaaagggtcagcatttatttttaaaaagaattcattccagtctaaatttgcctctcttggacttctaggggtttctttttgttacttacaagttagtttgggctacaaagacttaattttagtgtttgaaatttgatttggggaagtacagcaaatatcaaaggtttaaaacacttcatatcaaaacagaatcacaggttatggtaaaataagtcaatcatttagccaaagtgatcatgtaaaggtttcacaaaaagcaaaaacttttaatctttgatagaaaggagatcaaagttattaaacaaagtcctaataaacacaacatgagaccaacagaatctgtctcttcctttgtccaaatttttgcagttcatgcaaaagggaagcacaatttttcttactatttcttgttaatactacacaaaaaggaggaaaccaaattttacttttgtattagtgtattatcaatactaaagccaattttaataaaaccttaaaaacaaatccatccaatctcaaccaactttgaccatataagagtttcataaaccttttataacttcttaaaaaatttttttctatttattcctttctccaatattttaggtccttttagttttatttatatcatagtcctttaatttaaataacctcttaaactagacaaattaattttttactaaaaaaccacatttttatgtttttgttttttctaaagataaatcttttttatatttgcatcaagactatttttcccgtatctagtatttaattacacataaaattaatttagctcaagccaagtcaagcaagtatcaaaagtataacaaaatgaacagttttaggaccttaaaatatctattagaaacagtgtaaccctgtctgagcagtagaccctggcaaaatgtatgaattatatttaatactaacaattctgaagacatttacatgttattttggcaacaattttaaaactagttctacttgccaaagaatactaaaatcatgtgaacgaaaaggcatttgagttagtttctatttttctgataaaatacttaagtacttaattttcctctaagccaattaattaaagttctttcccacattttgatagtgaaatatcacatactcatgacacatataaatatatagacatataggcacacagacagaaatagatcttatgcctttagaatattcttcatttaccaatttttaaatagtttttctctccctttagactattgaggcctaagcaattgttagttaggcaatcctcaatttgcatgcccaaagacatgacttttaggtgaacatttacatcccaaaggcacagaaattagatctaaacgccattatttgttcagacaaaaaagggaataggtaaagattcaatcaagataaaatggttgagaaaagtgtcttaagaatggtaaattatataaactttaagccaatgtcttcctcactgtaaaagtttctagtggtttaggtacaggagggagatgcccttacaaatggagattttctttgtaagtataattttttcttttatatagaatttcaaaatagccagctaaatcccagaaagtcatattttggagaccaatctacacttaggtggtcttttcaactttgcttgttttgtttttgttgttgttgttgttgttagattattgacttcagggtgtagccctttaatcgatagggcaaagaaagcattttctgtatctgtactcagtgtagatagctccgaaaagaaacaagaatactttgcctgaagtcctatcttttataaacactttatccagcttttttttttctagtttaaaccaagagtattttttcacaaaccaatacatcttaacaaagtttatgacttaactgataataagctaggcatctccaaagaggtgccaagcaatcctcacaagatataggatcaccccaaagacagctcaaagaaagaaaagttttgctagctgcaaatggaatacatgtcacatttctgtctggctgtattttctacgatctcagcttgtcagctaagtgcctatgcatgaaggtccaaaagccttgtatgccccacagatggagagaccggatgtgaaaatctgtccatggaagaggaaaaaaaatcaataataaatggttactccaaaagatcaagagtcatatgaataatttaaaacaaataagactggttccctgatagggaattcatcctgggtcacagtcatagcagcacagaatcttagccatagactgcagtttggaatgattttctttaagtcctacaggggatccaaagagggaactttgagatgtaaaggattttaacttgtttcagctgtaatgttgcttagctaatcccttgaatgttaacattttacagacatgttaagctttacatctttaagagcagggtatttaaagggtatcatctgatattaggtcaataaatcataagtgtcatttattaattccagtttagaaaaaaaattgttggatctgtattttataatttcagtagtttcattttcattctgtagcaactctgttccctctggtccaaatttaaatacattttccccttttgagagaaagaaaattgtgcaatatggaattccaaaaatttgcctaagagatgtgtgggagttgagggaacaagcagaaagaggtaagttcagatcatagaggaagaagaaggagtagttggaaataaaagggagaaaactttgaatgtctttttaaatttagaaatagttttaggcaatctcttgtaaagaaatgactttatcagaatgtcttttagaagcttctaagtaccattgaaaaatagctctctaggttgttttgtttttattttatagccagcttttgctttttgtttgttttgtattgttttgtttttgagacagagtttcgctcttgtcgcccaggctgaagtgcagtggcaagatcttggctcactgcaacctctgcctcccgggttcaagtgattctcctgcctcagcctcccaagtagctgggattacaggtgcccaccaccacacccggctacttttttgtatttttagtagagacgggattttgccatgtttggcaggccggtctcgaattcctgacctcagatcatccgtccgctttggcctcccaaagtgctgggataacaggcatgagccatcgcacccggccaccagcttttgtttttaattaaacatgcagataaactaatgtagctatttccaaggtaccccattttcactattttagtttggggtcttcacagcttaagtaaaaccatttttctagatattgatgtgaggtaacaccataaatattatacataaatctcactgtagtttttaaagatagatctctcctttagaggtacgatagtccataatttagattttccttttgaatgaccaaaaagatcttgtaggagaaattttgttcatttaaggagaaagattagatttgtcaattgaatcaagcttcagaatctgaccagttttaaagattacaaattttcccttaagccacaattatttcactttttgtttttaaaaagaagttgtttctccttgaccaaatttcatacaacagaaaatgttgcaaactctaacaagaaagacattcaaaacctcagtaaaaagtaaaaatcccaaatctgcagtcagcaaaatctctagaaaataaccaatgaaactcctatcttaaaagcagagcttcaattccaactccattgactgtgaattaggttgcttgaatacagtctgaatctcaaatcaaaatcagggagatttgaaatctgaaaggagcctcaacagatgcccactggctctggcaaggtcagatgaacaaaaaccattcgtgctgggatcaagtctctaattgtgggcaaaatgacagggatcacaggaggcttgcttctggtccccctgggtcaccaaaatgtcaacctaaaataatcaaaagggtcagaatctagtttaaagagagtttattcaaacacaaagttcgaggatagactatacaagaaaaagagattacaaaaaatggaagccaatgttttgaagcacagaagtttggaatcacttatatagacaaagctagagaagtttaacagaatttcaacctctttctatgtaaggcttaatgcatagttacaatgatctaattagctgaggtggtctttttcttttgggaaaggcatatttaacattccatactaaagatgtaactgtcatggaatcttgtgtggcatctggtctgagttaggtacagggcaataaaggagaaagttaatctataaaaaagacctgtgattggaagaggggagatctggtttctgtctcttttagtcatttacagaacaagaacattaaagaagagagttaagctataacctaagaagcagaattgcaaacatgctatgtgactcaggctccagggcttaacttcctctttggcaccataaatttagagtgtcctgaaattttgttctatttcataataaactgctgtgaacatgataagaagaaaatacagtgaaatcccttaatatattgctgacgttagaatagacaatattgcccaccttcaagtttaaatctattatattaagcttttctttatttgcaagttatatgtttcaaaaactgttttctattcattcaaaactatggtggaaactatgtaacaagcttcattataatggaattttaatagatcaagtgaaaatgcctattgttataaatactaataaagttaaaactcatggttagatgagaatatcaactacttgaattttttacagtttaaagataaaataagagagacttcaatgttaaaaggcaacatttgttggctaaacattgcttcctatttgatgttaaaacagtctatcagttcttcaaggctgaactagcagattaaacaaataagaaaatgcatccaccaagcaattgagggcatgtcaaaagagcaggcagtttgtagtgaatacaatgaacagatatacctatgttttattaaaaaaaaatgtagtccatcaggggtcagtaaccaccaaaagcctaattaaaatgttgataaaaatcccatataactttcttcccttggaccagaataaacttgaggcaatatagaattcaattacacctacactgggagacattccttaaacctaagataccaacagattcaaaattagcgtattatctcaattaatatatgcagcacactaggtcaattgccttaagaaattaggccacagatttttaaaatgtacacagggaaaaagactacctccaaagtcatttctaagaagcatgccttcctcctcaacttaacagtaagatgtgagttttgaagacctgatctgtatacaagattaaaatagaaatcctttacctatatagcaagtaccagagcactgtagccacagttcacaaagaggatttgggtgggtgtgttctctgaccatcaaagaaacttaccaccagttcatttctgagtcccagaatgtgctttggttgttttctgagatttattttccctccaagtatgctttttctgcccaagtggagattccctggcaataataaataatttcctttatacctaaaaacctcattagaaatacagaccatagttatcaacttgattttaggagcaagaggttagaagtgatgttttcctggccttgtgcagtctgtctaactttagaagaggtacagagccttattaacaaggaagaaaacaatttacagggttttttgaacatggcttcaatatctgtgattgattagatttcagaaggttaagagggaatatgatgcaattgagatttttataaagcacaaatgaaggaaaactgggtgtttcattttgaaataaaccccctagggtcttaataaaatatctagcagtcattactcgatatactcactgcctcttctgccccttcctaacaaaactggaagaagtttaaagaactttaacattttaccccatgggtccatgtctgttagtcagtttggaaataaagcataaaaaataatgaaagaaagtttgaatttacatccaggataacaaacaagtttcatatttcctgacaaattcaatcaattagtggtggtgcctggagttctgtgttgagcagaatggcgaagtacattggttcagtgagaaagccacaatggattatttatgtttaccatcgactcaggaagggaatgtaccagcactcatactatgcacttgctaaatctgataaagacattcaaagaaataatggagatggaatgtttattttagaaatcacgatggagaaaaaataaaactttcataccaaaaagggagaaaaggaaaaatacgtgtgtgtgtgttttccatgtaatgcttctagagtaaagccattcatatattccttaagtacatatttatttagtacttatttaatattaataatactataatgtctataatataaatataaaatatttcatatttaatgtacttacctataaagcacattaaatataaaatgtaaattatatattatatataaataataaaataataaatatgtattaagtgcatcattccaaggtgatagagatatgataggaaacaaatttcccaccctattatcatccatgtgatgaaaaatcaagaaagcaattgaacaagttaagatattctgggagttataatggctgagaatttttttaaagcaaagaaagtgaacagagattatggagggagtgatttcatatgaaatggtcagggaaggcttctttaagaaggtggcatttgaagagaacctgaaagaagttagtggaagggctgtgtagatatatggggggcaggtacccagttcaggaaggagtgatttgggagtatccttgacatgtttaagttcagcgtagctggcctgtagagaacattagggaaagtggaagagataaggtgagagaagtggaggggagaggctgcaccggggagcagatgatgagggacctagcttcattggccattgtaagagaggtgtctcttattttgaaacagaaagttgccagtggagagttctgagcagagcaatgacatggataacttggctgctgttgagaaaaactgtggcataaaagggaaagggtcaaaaataaaagaaaatacaccactcaggagggtgctgcaataatccaggcaaaaatgatggtaccttgaaccagtatagttgtggtggaggtgatgagaagggatcatattcagaatattttgaaggtaaagcagatggaatttactaatgcattggaggtgagatatgagagaaagagaagattccaggaagactccaatatttatggcctgtgcaactagtaaaatagatatgtcatatgttgtgataagcagaattgtgagagcagcattttcagtgaaatcactacttaatctttgaatctgttagattctttttaatgttttaaatcaacttcgttagatataattcacaatcaataaaatacaccaatttaaaatgttcagtttgagaagttttgacagttttacgcttttatgtaaccatcactggaatcaagatatagagttttttttattaaccccaacatttgtcttgagtcctgtcccagtcaattacccagccatcacaggctccaggcaacaactgatctgatttttgtccctatacctttaattggtctcttctagcatttcatatacatgtgatcatacagtatgtaattctttgggttgacttctttcactcagagtaatattttcaagattttatatatattatgcatatcagtagttcatttcttttattattttttattattgagttgtaagagttctttctatatcctgatattactcccttgtcaaataatgtgtaacaaatattttctcctagtctgtggcttgtcttttcttttgaatagtagaacttttaattttgttaaagtttgattaatcaaatttcttctatagtttgtgtatttaattttcaaaaatttttttacctatcctaaggttgtaaaacctttctcctatgcctttttctagaagatttacagttttagttttaagtttagctctatgattcatttcaagttagtttttgtatatggtgtgaagcttatttttttccaaatgaatatcttctccagcacaattttttgaaaataatttactttccccattgaattgccttggcacctttttaaaaagtcctttgaccatagatgtcaaggtgtattactggactctattctgctgaagtcatctatatgtgtgtttgtcaggcagtactgcgctgtcctgaagactatagctttatagcaagacttgctttgaccctctagtaagtggcaatgacttattgtttttactaatacctgggtttccttaccatccattgattgtcttctcagctcttttactatttaaatgcattaagttctctttattgtaaatactggaagtggtttatgttttttaggttaaatctgataaatagaaattctcacaaaattgctcggtaggtactagcaattttaattatcctcactttagaggaggaaattgaactacaaagaaattgagtaatttgcccctgttggaagagacacaaaatggtgggggcaagattcaaagccaggcagtctagctccagagcttgtgcctctaacttctgctctcctgctgaagacatcattgtacagatgatattcaaactgagtgaaatcacagagaacgggggtaggaagaggtcagtagactgagcccaggggaactcaattgtttagggctcagaaagatgaggaagaactaaggaaggaggctgtaaagaagcaatgagtgaaggaagacaaccgtgagaaggaattgtcccagaaaccagtgaagaaagtgtttcaagagaaaggacataataaactatgccaaatgctgctagaaggtcaagttatgtgagcactggggaaacattggatttggcaacagaggtcattgatgttcttgataggaccagttttggtagaattgtgggagaagagttagcccaattagagtgaattcaagagtgaataaaaagagaggaaatggagacaatgagtatacaccactctttagctgcgtgtgtgttggggaatgggtgagagctgtgggtaggaaggggagagatgaagtcaggtatgtgtaatgaaacagatagtctaatgaaagagaaaatattgatgatgtaaacgttggagacagaaaaccacacactttgaagtgtttccaaacacgtagtttgctacctagtgccatatgtttttcagtgataagaacatggagtgtaattccccttcccacaagaatgtcacctcacctatatcagatctacatatgtgagttattggcctcaactaccagactccaaaatgcttgtaaacccaaggttttggacaaacatattgagagcttaggccatggcaggactacactctgtcagctgcctctctgaagaccaagagcccaggctgtggcaggactactctctgccagctttaagctactctctgaagccttgcccaccaaccctggctctgctcactagtgtctaggaccttgctggtcattgcggatccacactgtgtttatcaaactgtctcttccaagaacctttcatagaaaggtacacctcaaactttgattagattttcgatctacagaggcttgtttctatccttattgagcaactagactttaataattggactctaaatgaaattagaactcactcatgatgtggttaatgtacagtagttactgtttatccttgaggaatatgctccaagacccccagtggactcctaaaactgcagatagtactgaaccctgtgtacactatgcacaaacttcttttttcttctttacaatttcgtgtatagaagactcatgcttaccatagatcttagcaacctcagcatacattttttttctttccttattaagttgacaactttccccttttcacttaaaggtagcactttacggcctctcttttgaatatctgggttgtctacaatcactactcctttgctttggggcattatcaagtaaaatacaggtatctcatttgttgagtgtattccctgtgatattcattctcattattctcctccatttgagcattgtgtggaggaataaaaaagaacctcattgtatggcaacaaaccatgtgattcataaaaccatactgtgatcttcttattttaaccacacaaaacaccccaatttgggcaggacccaaattcatgcagagacaaatgaggaagggggccagacccagtgccaagaggcagagtcaagtgcaagaggaggaaaaatagcccattcgtaatggtggaataaggcagaggatataggagcaaggtggtttgacagacgatgtggtgggaaggtgtgaaagtcctcctctagtggcttctattttcttgggaaaataagaagttagatcatcagttgagagtgaagagaagcaagaaagttgtggaggcttaactaaagtggaaaaggtatgaattaggagactggaaattaaataggtcaggggtatattgtagaattgcgcagtggcagcattagagacctgtttgggttaaaaattgcaaatttaactgagattcagtcagctgatactgaataagtacccttcattttctaaatagccactttttttttctaataacatagttggaaaagaatagtaaggcagatctttgaattttaaaaactgaccaaaggaatctccataaaatttgccaattaatcatagtagtgtatcaaagataattttctgattttgttaatttcactgcaattatgtaagagaattcctggattttagaaaacaaacaatgaagcatttagaggaaaaagggataatcatgtgtgcagcttactcttaaatgatttagaaaaaaaagtaagtataaaatgaaatatatgtatattttttcttcccagtttcattaagatataattaacaaatgaaaattatctatatttatggtacacaacatgatgttttgatgtgtgtacacattttgaaatgactaaatctaactgattaatataattttgaaataaagataaaatttttttaacaaaatgagcatgtaaaaaataaaagtcaggggaatatatcccttatggcattgggtactttaaactctgctatactgagagaaacaaagtaagacaaatcatactaaaaacaaaggagatgaacaaacaaagtgggttttttccaaggccagctggataaattcgtacacagactaatcagtctgtatagagggttgtggaaaggagaggttgattggcttaatgcaagatttctcacctttagcactcttgacattttatggtcaggtaattctctgttgtgaaggttgtctgtgcattgtaggtcagatggttagcatcatctctggccgctacctactacacaacagtagcaaaccctctcaagttgtcacaaccaaacatgtgcccagacattttcaaacattccttgaaacaataccaccccaggtgagaactgatgcctgaacagacacttgcctatgatgtctatatttggaattttagaagctaggattaaatatatgtttacatatatatacatacataaatacacgcacatatatataaaatacacaaacatatgtatttatgtatatataatatatttacatattatgcattatgtgtatgcatgtaatatatagaaagggagatagagaaagactgagacagagagagagtgaaaaaggacagtacagtagatgtaataaatgttaatatttggaaaaatatgggttgaaagtatccaggatttgtttatactattttcgaaaatttttcataagttcaaaataatatcaaaaaaagactggcctatatttgaaatgaaatgcatctggaaaactactaaagtcttatattgtattatcttgattctcccatataaccttataatgtcatgattcagaaattttaagaaactattactcaaaatttatatttgagaaaaaagtcaaggcaaggctgatggtagtttgtttttaatttgtggctcaaaccattagagaaaatctgtcactgagacataaatttctattacgaagaaagaacatggatatactggttgttataaagactctctctatatgtacattttcctcaggactctcccacacaacagagaacatctttctcaagacaaaattctaggaaccatccttgattcttctccctcaccctccacatctagttcttcagtaagtctgttgatttgatccctcatatccctactgaacccctccattctctttgtctctataatcatcagtctggtccatgtcaccatgtcactcccctgtagacctgttttcattattgccccttcccccaatccatctacacagcaactaaagtcatctatttaatatcactcttgtttaaatgcttaaatattcagatgtgctagaattttacaacatttcacctgtagtcaacgataatgtatgattcacttaaaaatttgttaaaagggtggatttcatgttaggtgttattaccgtaataaactaaaattaacaaagaaaagaaagctatgtggcattaaagctggtttacatctttaaaaaatctattaaaataaatttttaaagaaaaggatttttccataagattaataaagctaataagaaagagcaatcaagacatgcaattgccactttaatcttgaagatggtggttcatattttcttgcagggtatttagagcatagcatcttacccaaatcccttttggaagttgtcgtaaaactccagggtctctgtttaaatagaagtgcacaatgaagtggcttagagaaattaacaaaaacaatgaaggagttcaattttaatagaagataaagagctagagtggagagaaaggcaaaagatgaaaactttaaattcttatgtaccatatcttaaatatcaaagacccaagatctgtatatgaacctaagttactgaaagttatggtcatttagagacagaaaaggagattgtcagtagcacggtaatatctcaaatctgggaagaaaactctaaatatttctaagcttttattgaatcacaaagaaactttcttgagatcgaactttgtcattttataaaaactctatttagcctttaaagattattttaacaaaagaatatttcaatttagggttttacagaaattagccaaatggagatggctgtcttaatgaccacgttttcttccattttcactgagataatgtgcacaaacactcaggaactcagagttttcccaatgcctctttcaaattttcacattgtgtagattctgaacaattgttgcaaactagttcctgacaatttttataatggaatttcttccatcagctgggtcaactgtttctgtgtgtctagctaattacttttttattttaagtgatatggacccacaatttaacaaaaccagtaagacagaaacatataatgaaaagaaaatgtcttttcctatgtcatgcccagtctttctcctgaaaggtaagcaattgagaagagtttcttatagatccatcagggagtagaagaaagataggcacacgcatgtacacacatgtttatacatatgtgcataacattttgcacaaattgcactatatgccaaagactgtttgaatctttacatttttcaatttgaataacttgctaagttacctttcaaggaggttgtgtattttattttcctaccagtagtgtatgaatgtatctattttttcatgccctccccaccattggatgttaacaaatgttttgaattgtgttaatctgaaaagtgaaaaatatcactttgctttcactgactttatttaattatgaatgaaagtatcttttcatgtttttgaccctttacatttctttttctgtcaagtgtttatcatctttgcctattttctgctacattttatcttaagaggccattcaagtaaaccccatgtaaatttagaaaaattaccaatagtaggttttatatatatatatatatatatatatatatatatatatatgtatatatatatatatatatcacatttgtaagtatagaaaaatcaccatttgtaggttatgaacacttttccaagatactcacatttttttgtttttttaattttgttttttacaaaattatgcttagagtctttttatggtataattttcaacattttatacctgtttctttatggctttggtgttttgtgccctgcttagaaggtcctccctgtgacaaaatttatgtataagtttatccaacttttcttacagtaattttataatgctattttaaaatttttgatatagccagatattattttaatattagtattagacagaaatcaactttagttttccaaacttctagcaaatttttgcagtattacttatgaacctctttttctttctttcttttttttttttgagacggagtttctctcttgttgcccaggctggaatgcaatggtgcgatcttggctcactgcaacctccacctcccaggttcaagcgattctcctgcctcagtcttcccaagtagctgggattacaggcatgcaccaccacgcccggccaattatgtatttttagtagagatggggtttctccatgttggtcaggctggtctcgaactcccaacctcaggtgatccacccgccttggcctcacgaagtgctgggattacaggtgtgagccactgcgtccagccttatgaatctatttttcttcacccatttgccaccttcataatatattaatttcccataaatagttgtatctattactggaccttttattatgtttcctatatataattattttatagtaccaaattcttttaatatttttacttgattagacgttctattatctgatagacaagtcttctgctgtcacttttctgtttcaaaattgtccttgctatacttacatgtttacttttacgaatttactctgttagtattttgtctgattcatccccaaaagcttttgctattttaatgagactgatgaactttaattaatttagcattaattgctagctttgcaatgttgactttacctattcataagccagcttccattttatcaatctcaatgaagttaaaaatgtagtcataacagttttataaattttatacattcctcattaagtatttctcttttataactattatatgttgaatattttcttcctttttctttttttttttttttttttttttgagacagggggtcttgctctgtcactctggctggagtgcagttgtgcaatttcaggtcactgcaacctctgcctgccgggttcaagcaattctcctgcctcagcttctggagtagctggcattacaggtgcacgccaggacacctggctaatttttgtattattagtacagatgggatttcaatatattggccaggctggtcttgaactcctgatctcagacgatccacctgcctcggcctcccagagtactgggagattacaggtgtgagccaccacactcagcttttgtttttctaacatttattgtttactgctagagcagcttctttactgttgagaaagattatatattattattgcttttttaaatttttatttatttattttgagacagagtctcgctgttgttgcccaggctggagtgcaatggcacaatctcagctcatgcaacttctgcctcccgggttcaagcgattctcctgcctcagcctcctgagtatcttcttaattggaatgtttatagtgtttctccattaagcagtttcattatgctggatttttgtcaaatatattcaacatctattgggttgggatattttccccctgttagtccaatattatgaaaaattatattagttaattttctagcatgtaaatatagttgcattcttaggatgaactgcacttgacgaagaagtagaatttattaattgatccacttaatgctatttacaaatgttttaaatacatgcatattaatagtgtaagtgagcttggtctgcaattttttttttttttggtgggaagtcaaattttagtatctttttctgctcaaatatgtagttgaaagcttttcttctttctctgttcactgagatactttaaatcgggttggaattatccatgaattatcattgtccatgaaaccctttaaactgatttttcagaaagtagtccttctatcttttctgcaaatttggtttgatttcttctttataaaaagacttttttttttttttcagacggagtctcgctctgtcgccaggctggagtgcaatggcacggtcttggctcactgcaatctctgtctcctgggttcagacgattcccctgcctcagcctcctgagtagctgggactacaggtgcctgccaccacacctggctaatttttgtattttagtggagacagggtttctccatgttggccgggatggtctccatctcctgacctcatgatccgcccacctcagcctcccaaagttctgggattacaggtgtgagccaccacgcctggcctataaaaatacttttaagtatttttaagtataaatgtctaggtagttgtggtttggatctttcaaaattaattatctttttttttttttttggttttgagacggagattcactctgtcacccaggctggtatcagtaggctctgtggtgatcatctcttttttattcttgatcttgatggtttatctccttgtcttcttgatcactacctgagagtgtcaattttgttggtcttttcaatgaatcagtctttggttttgttcattttctctagtctgttttccattttgttgatttctgttcttatctttaatattttcttcaactgactgtgtatagtttgcttttttttttagcttcttaaggtgggatattaggcattgacttgaaatatttcttcttttctaatatgaacatttaaaagtatgagtttccctctaaggatagtattagatttatctgttcattataattcagtcaaaagtattttctgattttctgtattctctgtgatattctttgagttcatcctatttggagtttgctgagcttctacagtctataagtttatgtctttcaccaaatttggggaattttagccggattttcttcaactagcttttgtgcctctatctcttgcaccaactctctaagactcctatccatgtatgttagactttttaatattgtcctatgtgtccctgagagctgagagttttttccaacttgttttctctttattcttcaggttgggtaatttctttcaacttatcttaaagtttactgactggttcctctgtcatctccttgcagcttgtgaacctaactatccagtaagacttttaaaatttgaatatattatacaatcttgtgccacataatgacatttcaatcatcaacagattgcatatatgagggtggcccataagatgataatggagataaaatttcccattgctggccgggagtgatggctcatgcctgtaatcccagcactttgggaggccaaggtgggtggattgcctgatgtcaggagttcaagaccagcctggccaacatggtgaaaccccatctctactaaaaatacaaaaaaattaggtgggcgtggtggtgggcacctgtaatcccagttacttaggaggccgaggcaggagaatcgcttgaacccaggaggcagaggtttcagtgagctgagatcacgccactgccctccagcctgggctacaagagtgagactttgtctcaaaaaaagaaaaagaaaaacagtttctactgcctagtgacattttgattatcctgaccctgtgtaggcctagggttaatatgtgtgtttgtgtgttaatttttaacaaaaaagtttaaaaagtaaaaataagtaaacagttgtaaaaatagaaaaaagtttagaggataaggttctaaagaaaaataatttttgtacaattgtacaatgttttgtgttttaagctaaatgttattacaaaagagtcagataattttaatttaaaagtttataaagtagaaaagttacagtaagctaaggtttattactgaagaaagaaacttgttttatataactttagtgtgtacagtgattataaagtctacagtaatgtacagtaatgtcctaggccttcacattcactcaccactcactcactgactcacctagagaaattttcagttctgcaagttccattcaaggtatgtatcctatacaggtattccatttattatcctttataccatattttcactagacctttcctatggttatatatgtgtagctaaataaatactttccattgttttaccactgtctatagtatgtaatagagtattttaccactgtctatagtatttaatagagtaacatgctgtgcaggtggtaacctaggagcaacaggctatcctatatggcctaggtgtgtagtaagctgtatcatctaggtttgtgtaagtacactctatggtattcacacaacaacaaaaatcacctaacaacacatttcccagaacatatccttgttgttaagcaatgcataatagtacttatcacctctaaaatttctatttggttctttttaaaaagacaagtctctacatgtctcatgagactttctctcatttcatttttttcaggagtgttcgctctacaacatgttgccttagttatattagctgcattaaagtatctgatagttccaatatctaggaggatctcaaggatgacaggagttcattgtcttttctcctgacgattagacacatgttcttggttctctgtatgtaggataatttttttttattgtatccttaacattgtaaaagatggattgggtagactatggtttctgttttaagtatctgtagaagccagtccgattcaggcagtatgatctgtctcatttctgtaggtggtaatttgaatttcagttccatgttcggagcctttgttaatctgttgtaggtgttgctcatgtatttatggttcatggattagtatgagggtgttttgagtagtctagttatcatttcagttattttatccattatttaggtctttcctgagtaggctttattccagggggcattattcctgagttaaagcaagagatttgtgcatggagatcaaagctccgtcccattttgaaacctctgttatgtgctaatttggtctgacttgtacatgcatagataggagttaggcagaaacctgtgtaggatcacatacagaattagaaaacttctctaattttctccttcctaagaatttccccctaactcacttcagcttgtaaagtccccttttcctggtttctatggggcctgctcttagagcagagtcacaaaggaaaaatcaattaacaaataaatgggaaactcactcaatatggaacatgtcattcagtttttgctctcttctacaatctgtcttcttttgtttcttttcagtgtaattcagaatttttgtttgttgttcagagtttagtattgggagaaatgggttgtagtaggattattttctgagattttggcatttgtttaatgataccttttgtacttaaatgacaacaaatcttgaattttttttattaattcatttcatcagagctctagagactttgtgtcactgtaaaattagagggagtctgaaactacctgcataccgtttttttacacctggatcctcataaaattctttgtccttgaagtttagagtagattattcttgatgatgaacattcttcatcagtttttcttagtacatggtaggcctcttgatctgtggtttcagttcttccttttcatgtaaaaatactcattattttgtctttgaatatttttctctattctagtgcttggtttatcttatccatgcatactgaaggtcttcatatagaattattgtttgctttccatatcttttacattgcctctaattgttttaatctctgtccctttcatatcaaatcactgttattatctcaaaccttccctccatttcaaaaactctgtttttaacatgtttaacttattcattagttctgtgttaagcacccccagtttggtgccttagccctgaaatctcccattttatttctttctattgcttcattattttattttttatttcaattttactgaatgtatgttcttcttaattcttctgtgttcagatctctcatgtatgtatagtgaattgaatagtgttaccccaaaatttacgtctggaaactcagaatattaccttatttagaaatagtctttccagatgtatttaagataataattgagataagattatgccggattaggatgcaccccatgtcccaagagagtacccttataagaaacggaaaaggtcaaacagaaatacctagagaacaaagccatgtaaagatcaatgtacagactggagtgatacatccacgagccaaagaatgccaaggattgccagaaaccaccagaggctaggagagaggtacagaagagaggaagtagctttggaattgggaaatgagtagaggctggaagaatttttaagccactttatagaaaaaaaagtttagattgccttgaagagatgcttggtggaaatatgaatgttaaaggcaattctgctgagggctcagatagaattaaggaacatggtagagagatcttctatcatcttagtatatctatctatctatctatctatctatctatctatctatctatctatatatagagagagaacagaatgttggtagaaatataagtaaaaggatgtttctggtgtgatctcagaaggaaatgagaggtatgtcatcaaaaaatggaagaaagaaaattctcattataaggtgacagaaattgtttttaccttattttgttattttcttttaacttttgtttaaggttcaggggtacacttgcaagtttgttatatacatacactcatgtcacaagggtttggtgtacagattatttcatcacccaggtactaagcacggtacccaaaaggtattttttctgatctcgttcctcctccgaaccttcacttccaagtagaccccagtatctagcattctcctctttgtgtccatgtgttctggttctttagctcccagttgtaagtgagaacatgtcatatttggttttctcttcctgcattagtttgcttaggataatggcctctagctctattcatgttgctgcaaaggacacgatttcattcttttttatggctgcgtagtattccatgttgtatatataccacattttctttattgagtctaccattaatgggcatttaggttgattctgtgtctttgctattataaatagttttgtgatgaacatatgcatgcatgtgtctttatgatagaataatctatattcctttggttatatacccaataatgggattgctggattgaatggtaattctgtttagttctttaaggaattgccacattgctttccatgatgactgaattgattaacactcccaccagcagtgtgtaagtattcccttttccctgcaaccttgccagtatgttattttttgactttttaataataaccattctgactcacgtgagatagtatgtcatcacggttttgatttacatttctctaatgattagtgatgttgggcattttttcatatgcttcttggttgcatgtatgttttcttttgaaaaaatgtttgttgatgtctttgcccactttttaatggggttgtttggtttttgcttgtaaatttgtttaagttccttatagactctggatattagaacactgtcagatgtatagtttgtaaatattttaccctattctctagttgtctgtttactctgttaatagtttattttgctgtgcagaagctctttagtttaattcaatcccacttgtcaacatttgcttgtgttgcaactgcttttggggtcttcatcatgaaatttttgccggttcctatgaggtgacagaaatcttgagtgaattgtgttctatagttgggcagaaagcaaaacacataagtgattaacttggatgtttgagctgaggatatttctaagcaaagtgtgggaggttcagccttatttatctttgccgctcgtagaaaaatgtggcagaaaagacataaattgaggaagaaactgttaagcaaaagaaaccagagtttgatgatttggaaaattctcagcctatcaggtagtatgctctagaagtaagaacaaacatcctgaacaatattttgctgaaaagattacatgtgtaactcaataatcagatcaaccttctcagcagaagccaaaaatttagatgacattattcaagaaaatgtctgtagaggactcttgtccaatagcatggactgctgtgaattccatgggaaaccaacaaggcttttcagaatgctacactagcagaaacactatgtgatagtttattttcacactgctgtaaagacatacctgaaactgggtaatttataaaggaaagaggtttaattgactcacaattctgcgtggcaaaggaggcctcaagaaacttacaatcatagtggaaagcaaaacaggcacatcttacaggtgagaggcaggtgagagaagtgagtgccaagcaaaggggacgctccttataaaaccatcagatctcattagaactgactcactatcatgagaacagtgtgagggtaactgcccccatgatttaattacctcccatagggtccctcccatgacacatgggtattatgggaactacaattcaagatgagattttggtggggatacaaagcctaaccatatcattccgtctctgaccaaatctcatgtcctcacatttcaaaacacaatcatgccttcccaacagcctcccaaagtcttaactcattccagcattaactcaaaagtcctagtctgaagtcttatctgagacaaggcaagtcccttccgcctatgagccagtaaaattaagagcaaattagttacttcctagatacaatgatggttcaggcattggataaatacacctgttccaaataagataaattggccaaaacaaaggggttatacgccccatacaaatctgaaatcaatagggccgttattaaaacttaatgctccaaaataatctcctttgactccacatctcatatccaggtcatgctgatgtaagaggtgggcttccacagccctggtcagtttcacctgtggctttccagggtacagtcccgcatcctggctgttttcacaagctggcattgagtgcctgtggcttttccaggtgcagaatgtaagctgtcagtgtatctcccattctgggatctggaagacggtggccctcttctcacagctctactgagcagtgtctctgtggggactttctgtgggagctccaaccccacatttcccttctgcactgccctagaagaggttctccatgtgcacacctctgcctggatatcctggcatttctgtccatcctctgaaatctaggcagaggttctcaaagctcaatccttgtcttttgtgcacctgcaggacaaacaccaggtggaagctgccaaggcttggggcttacaccctctgaagcaatgacctgagctgtatcttggccccttttagccacagctggagctgaagtagctgggatgtggggcaccacgtattgaggctgcacagggcaggggggccctgggtccagcccacaaaaccattttttcctcctaggcctctgggcctgtgatagaaggggctgtcatgaaggcctttggcatgtcgtggagacattttccccattgtcttggtgattaacattcagctcctcattacttatgcaaattactgcagcaggcttaaatttctcccccagaaaatgggttttccttttctattgtatcatcaggctgcaaattttccaaacttttatgctctgccttctgttgaatgcttcggtgcttagaaatttcttctgccagatactctaaatcatctctctcaagttcaaagttccacagatctctagggcaggagcaaaatgccactagtctctttgcacagcaagagtgatctttactccagttcccaacaagttcctcattgccatttgagaccaccttggcctagattttgctgttgatattactatcagcattttggttaaagccattcaacaagtcactgggaagttccaaactttcccacattttcctgtcttcttccgagcccaccaaacggttccagtctctgcccattacacagttccaaagtcacttctgaatttttgggtatcttcacagcagcacccattctctgtggtaccaatttactgttttagtctgttttcatgccgctttaaagacatactcaagactgggtaatttgtaaagaaaagaggtttaattgacacagttccacatgtctagggaggcctcaggaaacttacaatcatggcagaagatgaaacaggcacgtcttccatggtggcaggtgagataagttagtacagagtgaaggagaagccccttataaaaccatcagatctcttgagtacttattcactatgaggagaacagcatgaagataactgtcccagttattcaattacctcccatagagtccctcccatgacttgtggggattatgggaattacaattcaagatgagctttgggtgggagtgcagccaaaccttatcacactaccagcctggactgaaaggggcagagagaagacaaaatgaaggaaggccaccagatttctgggattctagcaagaaatgggctgatagagctattcagtcacaaatatttgttcatctttaagagaaaggaagaattactctgagggcagaaccacagatacaaatataaaggccagagacagcaggatgactaccatgggcccagaaaacagaggatcaagcctcagaggattattttcagaccttgagctgaatgcagtttgtcctgccaatttttgcacttgcttcaaaccagtaacccttttataacttccaatttctccctatggaaatgaaaatgtttatcctatgcgtgtcccagtggtccacagatggagaggattgctaagaattgccagcaatcaccagaagctgttctccagaactgtgagagaataaatttatgttgttgtgttacccagtttgtggtaatttatttcagcagccctagtacactagtacagtgtagaattaacttttatttctttcgtattattttcctatatgatggatttcaactattggattttttgggactatgtttccttctttaatcgtttttattttagtgctttttatgtaggctttatgccattcctttttcctttaattatttttcatttgttctattaagaccttctgtttgctcctagataattttggaacattcttcctctcatgttactgagaggaattttttattcttcacaccttcaatatgagtatttttatatttctgatttagcatgaagaggaagagtgaagtcaggctatggacaatcacggatagattactttgcctgtgcactctcccatataattttgttaaaaactcactgtataagaaaaatggctagactgggtgcagtggctcactcctgcaatcccagcactttgggaggccaaggcctgaggatcaccaaggtcaggagttcgaggtcaggaggtcatggcgaaatcctgtatctacaaaaaatacagaaattagttgggcatagtggctcacccctgtagtcctagctactcagaaggctgaggctggagaattgcttgaacccaggaggcggaggttgcagtgagccaagatcacaccattgcactcttgcctgggcaacaagagtgaaactctgtctcaaaaaccaaaacaagcaaacaaaacaaaacaaaaggctaaagacttcagtgagacctcacaagagcatatccaaatggccaattaacatatgactaaaaaacactgagtttccaaggatctagaacaatcctaaatgtcattgattgctggcataaattagttaaccaccttgaaaaattgtttggagcatctatctatatgtatggtaatatatcatgtgtttgctctatgaaccagcaattaaacttctagatgaatactcaacagaggggtatttatgtgttcacaaaaagacatgtaaaatatgttcatagcatttccaaactgaaagctgatcaaagaactcaactgtaaaatggaaaaaaaacgattatatgctcacacaatggaatacatacagtagtaagagtggacaaactaaaactacacacaacaatatgctaaatctcacaaacataatattgagcaaaaaagagatttaaaaaatctattgtattgaccaggcatggtggctcatgcctctaatcccagcactttgggaggccaaggcagacggatcacttgaggttaggagttcaagaccagcctggtcaacatggtgaaaccccgtctctgcaaaaatataaaaattagccaggcatagtggcgtgtgcctgtaatctcagctactcaggaggctgaggcaggagaatggcttgaaccagggaggtagagattgcagtgagtccagatcatgtcgttgcactccagcctggaggacagagcaagacaccgtctcaaaaaaaaaaaaaacttttatataattccaccatttacataaatttcaaaaccaggcagaactaatctgtgaaattaaaagttaggataatgtttattctcgggagagatggataatgactagaaaggagcccaaagaggtccctgaggcactagccgtgttctgttacctgaagtgattgccagttatgcaggcgtttaaactttgtgaatattaattgagatgtatacttacgacttattcatttttctaattgtatgctatgactcaacattatagggttgaattatagggtttttgtattattttaagttcagtgcctttaatttactccttcaggttaggccattgtttgtttgtttgtttttactttaactgctcttaggatgtagctcctcaattcacttaccatcactcaccaactgccactatccaccccatcccacccaatttttcttctctgttttttaactacaaattgttggttcatagaaagggaaattgaattctacctgcagcactccaaatgcctcttccctcagataatgttgttttatttcctcttctagcatcctttttttaaattttattattattatactttaagttttagggtacatatgcacaatgtgcaggttagttacatatgtatacatgtgccatgctggtgtgctgcacccattaactcgtcatttagcattaggtatatctcctaaagctatccctcccccctccccacaccgcacaacagtccccagagtgtgatgttccccttcctgtgtccatgtgttctcactgttcagttcccacctatgagtgagaatatgcagtgtttggttttttgttcttgcgatagtttactgagatgatgatttccaatttcatccatgtccctacaaaggacatgaactcatcattttttatggctgcatagtattccgtggtgtatatgtgccacattttcttaatccagtctatcattgttggacatttgggttggttccaagtctttgctattgtgaatagtgccgcaataaacatacgtgtgcgtgtgtctttatagcagcatgatttatagtcctttggggatatacccagtaatgggatggctgggtcaaatggtatttctagttctagatccctgaggaatcgccacactgtcttccacaatggttgaactagtttacagtcccaccaacagtgtaaaagtctgatctttgacaaacctgagaaaaacaagcaatggggaaaggagtccctatttaataaatggtgttgggaaaactggctagccatatgtagaaagctgaaactggatcccttccttacaccttatacaaaaattaattcaagttggattaaagacttaaacgttagacctaaaaccataaaaaccctagaagaaaacctaggcattaccattcaggacataggcatgggcaaggacttcatgtctaacacaccaaaagcaatggcaataaaagccaaaactgacaaatggactctaattaaactaaagagcttctgcacagcaaaagaaactaccatcagagtgaacaagcaacctacaaaatgggagaaaattttcgcaacctactcatctgacaaagggctaatatccagaatctacaatgaactcaaacaaatttacaagaaaaaaacaaacagccccatcaaaaagtgggcaaagaacatgaacagacacttctcaaaagaagacatttatgcagccaaaaaacacatgaaaaaatgctcatcatcactggccatcagagaaatgcaaatcaaaaccacaatgagataccatctcacaccagttagaatggcaatcattaaaaagtcaggaaacaacaggtgctggagaggatgtggagaaatagcatcctttatactagatctctaaacagttttaaagatcaattggtttagatgattgtcatcatttttcagacttctttactcagcttgtcccactgtagtgagctctggtagacttgccagcctctggtgcattggtagggagtgagttacattttatactctcagagtgtttggtgtgttttccccaagctgaccagacacttctggcattcattttttttttttttttctaaattgtggtgactttgagagggcagggaagagagaagtaaagggaatggagatcagcgacattttttaggatctaattcatctcctctccccatactgcttacaggatgaatggaggaggaaatcttcactatgcctgtcatattttgcctctctttccctgtcttgcttatatatctatgtatttgattcttgctgccatactaaattattcttttgtacatcttatagttgttgttttaaacttattatttatttattttggaagagaaaggtctatcatacaacttttttccactatcttttcccagaaagcacaggacaagtttctctaaaagctactatatattcgaaggtacaccagtagagagtctacacaaaaacaaacaaacaaacaaaaacaagacaaaaataaaccttgtattaacccctgtaaataatgataaaaataataaattcatacagcaagtcaaaaattttaatgaagactcacgcaatatttgacccaaggtgttaaatagtagaattcgatcagttcaggtccagaagtaggatgaacatctccctcttctcaaaagacaattaagcactgcgtattttctccttgaaggcaatgacagtgtcctatttactcttcactcccctacccctaccactaagactctggacaaagtccagttctaaataaatatttgtaattgaataaattaatggatgaatgagaatgtaatcttaacaaataaaatataaacatagcacgttaatgttagaaaaaagagaaaaacagaaaatgtctctttaccattcccttatactttttaaaacaatttgctagcattgtgccaaagaacaaataagcatttaacttaataattaggaaaagaaaagcctaaggaaaaaatattaaaaaaggcaacattggaattgaatgtataataaataagtaaataagttgagaaaaccataaactgactctcaaatgaacaaagaaatagattttaagcctcaccaggaaaggattgaaaactaaagctccacattgatatatttgaaaaatccgaatattttaccaatagtaaatgtaatttcctagtaaaacacccatttccaaaactgcttcatgaagaagaagaatctgtgaacttgtcaaagtattctctcacacaaggcacaggttccaaatgatttcataactgagttattttaaattctcaaggaataaaaaattcttcttcctcttaactatttccggattatggaaaaagaaggattggccaggtgtggtggctcatgcctgtaatcccagcactgtgggaggccaaggtgagagaggtcaggagtttgagaccagcctggccaacatggcaaaactctgtctttactaaaaatacaaaaaattacccaggcatgctggtgtacgcctgtaatcccagctattcaaggggctgaggctggagaatcgcttgaacccggcgggcagaggttgcagtcagtgagccgagatcacaccactgcactccaacttgggctacagagcaaaattctgtctcaaaaaaaaaaaaaaaaaaaaaaaggaaggatcacttttaagtgcactttataaggttagcatattgatatcaaaacctgcccagaatgacatcaaaaaagctgatatttataaagagctttctgtataccaagaacattgtaagtgttctagaaatttcaatctatttattccacaaatacttacgagactgagcatttctctcatcttacagataagaaaacttagggaagttaaataacttctccaggattccacaattagtaaacggtgggacagagatggaacctaggtaacttgcatcgaggagacaagctattaaccactatattttatgtttcccatagaaaatagaaactatcggcctatttcatttatgaatgatgatgccaccatctgagataatttactagaaagtttatttcaaaagtatattaaatgaaaaaaagaaaacacatctacatcatgatgaaagtagggtttactcaagaaaattaaaaatagattaatagtataagaactatataattcttaaattgccatctgaattttatatagtctaatcaatcagaaaagatatacatacacatatgtgtaacagaaattatcattactcataacataataaacacacaaataaaatgaaaaaaattaaacaatatgagaattcggtacaagggttgctgagtagattttgttgggcaggcaactaaacccagagtctccaagtaggagttgttaatcagttgattactcttttgaacagtaacaataagggtagagggtgaccacaaatactttacttgccacttaaaattactttggcctactaagtcatagattactgactttaggaatagatcttcatacctgccctttgggagactgggaacaagaataacatgctgagaggttgcagcaaaattatgatttcacagctgtgagacagccactttgatctgcaaatgtcctccctttgggcttgctgaaagctgaaaccccattattaaagatccttcttgctggctggaagttttcatactgtgttaaatgaaatgcttatggttaagatggtttactaactttcaaaaggcatttctaccttaggacaggtaattaagggtaaatatattggtttttctggtccttagtttactcatttgtaaaatgaagcagtttgaacaagataatttaaattttcttccatatctaacacttcacgatcctagagtcctcacagtcttccctgtaagtaggtgcttactgttgtgatggagcagaagttctgagaccctgatgataccaagaaggagcaaaatggtgagagtggggagatgtaaggacaagattcagggagggtgtctcactttaggctgcaataacagaataccatttctcacctcaaagaattgccgcaataaatattttgtggcttaacaaacgtgtttctcacagttctggagggtggaagtctgtaatcacagtgccagcatggtcaggttcttagtgagggcccttttttcctgtttatgttctcacctggatttccttggtgagtacctgcagagaggcagagagagagagagagagagagagagagagtgagagagagagagcacttttgctctattctctttctcttcttataaggacacaatcccatcatggaggttccaccctcataacctcacttaattaccttcgtaagaccccacctcctaacaatatccctttggagttttggtttcactgtactaattttgggtggatgcaaacatcagttagagggctaaagacaaattctaaatctttcagaactttgaagtgtatacattatcaaatgatcatttgcatgtaacacttttaaaaattgtatcaagttaaaagcagctgtataaattaaaagtatcgccgggcgggcgcggtggctcacgcctgtaatcccagcactttgggaggccgaggtgggcagatcacgaggtctggagatagagaccatcctggctaacatggtgaaacccgtctctactaaaaatacaaaaaattagctgggcgtggtggcaggagcctgtagtcccagctacttgggaggctgaggcaggagaatggcgtgaaccagggaggcggagcttgcagtgagccgagatggcgccactgcactccaacctgggcgacagagcgaggctccatctcaaaaaaaaaaaaaaaaaaaaggtatcaagcattattcattcagctttattctgggacaggaagtgacagaggggaaagctaaaacttttaacaaccacattacaaacctgtatttgttattgatgtatagaaataaaattaattttttggtgactttgtataactcaaccttactagatttacttattaattctaacaatttatctgtaggttttttttttttttttttgagacagagtcttgctctgttgccgaggctggagtgcagtggcacagtcttggctcactgcaaactctgcctcatggattcaggccattcttgtgcctcagcctcctgagtagctgggattacaggcacctgccacactctcagttaattcttgtattttcggtagacacagggttttgccgtgttggccaggctggtttcgaactcctggcctcaagtgatctgtccgcctcagcctcccaaagtgctgggattacaggcgtgagccaccgtgccaggccagttgtctactctgtatgttcttttacattttctaggtacatatcatattatttgcaaataacagcagttttattttctcctttccaaaccctttaacatttttatttctatgtattgtgcttatcaccctagctaggatttcttattcaaagttgaataggaagggtgctaaatagtatacttgcctcatccttgccattgtaattctattgttttacatatttaatattaatttatatgtatctatctacttacctttgcattgttctttctgaaatttcacctgcattcttttctatctgcaagaataccccttaatatttctcttggtttggatctgttgctaacaaatgctatttagtttatctttatccttcaaaaacatattttttcaaagctttaaaggctatctttttattgtctttggacattcattcttcctgttggaaattcagctaccagccttatttttagttctatgagttcaagattgttcttccttcattaccaacaagaggcaaatgtaatgctctgtgaagaaatataatatcaaactaaacttagaattatttcacaatattttacatacaatttccaacattcagtcaaaaataacaaggcacatgagaataaaaaagaacagaaacaaaactttggggaaacaataggcaatagaaccaggcaagtatccagaagtaatgatattattagaaatatattttaaaataattatgtttattatgttctgagacataaaagacaagcttgaaaatattgacacacaaatggaaactttaaaaaggaaagaattgactgggcgcagtggctcacacctgttatccgaggcccacggatcacaaggtcaggagttcgagaccaccctggccaacatggtgaaaccctgtctctactaaaaatacaaaaattagctgggcatggtggcacatgcctgtaatcccagctactcggaaggctgaggcaggagaatcactgaacccgggaggtggaggttgcagtgagccgagatagtgccactgcactccagcttgggacagactgagactccatctcaaaaaaaaaaaaaaaaagaaaggaaagaactacgtcaaaactaaatatgtaattaatgaccttattaattatataaatatatgttatatatttatgttatataattatgttatatatttatgttgtataattatatatattatatactttgtaatatatattatttatatattatataataatatacatatgtatattattatatattatataataatatacatataatgtatattatttatatattataatatatacatattatataaagatataatatatcatttataatatatataaatatataattatataatgtatattatatttatatatatttatatataaatatatatttcatatatattttatattttatattttattcataataaaaatattatatatttttatttaatatatttatttaataaatatatttttattattttatatatatatatttaaatatatatatttaaatatatatattaaaaatatatatttaaataatatatttatttaataaatataatatattttattaatatatataataaatatattatatttgattatataatatataatatattatatttgattatatattatatttgattatataacatattatatattatattatattatattatattatattatattatattatattatatataccattgctttcttcccccaaatgagccttttcctcctctgcaccttttcccaaaaagatgcctgcatataggggaagaaagggtttatatggtctcttggtaatgggaaaaagcaagctgttatgaactgaactgttttgccctcaaattcatatgttgaagccctaactctcaatgtgactgtatttgggagatgggggctttacagaggtaatcaaggttaaatgtggtggtatgggtggtagtttaatctgataggactaatcctcataagaagtgaaagagaaggcccagcatggtggctcatgcctgtaatctcagcactttgggaggccgaggtgagtggatcacctgaggtcaggagttagagaccagcctggccaacatggcaaactctgtctctactaaaaatgcaaaaattagccgggcatggggcaggcacctgtaatcccaggtagtcgggaggctgagacaggagaatcgcttgaacctgggaggtggaggttgcagtgagccgagatcctgccactgtacttcagcctgggcaacagagtgagactctgtctcaaaaaaaaattatacatatataatataacaaatatatgtatatatgtaagcactgttctaaccctctgatttgcaaaatattcaataatgaaggcacaagagaagacggccatgcagccgcaaagtcagagattgggagattcattaagtgaggctaaggaaaaaaggtttgtttcatttctcttgttgattctgaggcatatacgaaatgtgtgaaataatgaggactatcacacactgtttgtgtgtatgttatttattaaactgcacatatcacattgtatttaggtaactcaattatgttgatgagactcttctgaatactctttcactcctgcatgcctttgaacatactgttaccttcacttggaaaatctttcccctcaatctacttaatgagctcctagatatgttcttaattttccagggatactgcaacaaagtgcaactggtgcttagaacaagaaaaatatattgcctcaccagtccggagattagaagtctgaaatcaatgtgctggcagagctgtgctctaagattttctaggggagaatccttccttgactcttctagcttctggtgtttgtcaacaacctttggtgtcctttggcttgtaggtgcatcactcaatctttgcttctgttatcacatggccatattatccccgactaaattagtgtctctgtttctgtgtgtcttctcttcatcttagaaggacaccagtcatactgcataagggtcatcctactccagtatgaccttttcttagctaattccatctgtgacaatcctgtttccaaattagagtacattctgtggttgcaggaaggacatgaattttgcaaggactctattcaacccagtaaagtatcctttggcactttcctcaaagacagtctcatttctgaagtgtgtgtgtgagtgtgtgtttcttttaactaaccactttggacattctttcatcaaggcacatatagctgtagctactgtttctctctcttcctctctcccttactagactaagacttaagaaaagggaatattctatttatctctatgtcttaaggacctaccagaatggctagcatatgtgtgtacttagaaaatatttatgaaataaaatgaataaattacccttccctgaagtcctaaagactacagatataaagacaaatggagacacctcccccagcacgagctacagaaaagtggaacaggatatagtcacattcagccttcaacaaagagcagcttatagttatctttaacttttcttgaaatctatataaataaggtgaaattttgtctctttatctgctagtacataacaacaaaaaaagttgcatgataaattcttagcaagcacaaaggttaagttttggattgcctaacttaaaacatgagtgagatgacttatgctcatgtggagccctgggaggtgccttaaatagacaggcagtcagtcaccctccagagcaggctgagctgaggtaaagtgagagggtggtgactaattagaagcatttcatacataatatgacactgtggtcataaaagacagtgctttcaaatatggactcaagttgtagatatatacactgatgttccaaattgttgtagttgctgtgcagtggagctacttctcacataggcagttccatgaactgcctttcagggtgaataggacagggatttaattatttaagtaattcaggagtgtttcactattcacttagcagagcgaagggctattagaccaggaagacaattctagatgtcgtctagtccaattttcattttatatagaaatgaagctaaggtttacagtttaaataaatattctacagtccacaaattaatttttaaagagcatttaatgacagaaaattagcattttatagtactagtttaagtatgtaacattatgacaatgtaatttaaaaaatgtgtatgagcttagaaaaagattgaaagactatacagtaaaaggaaataatcacagatgtgaatatgcatgattattgccctctttgtatttttttgaagtttcctgttttctataaataagtaatatgagttgctctagttgattccagggctggtttccttaaacttctttgctcactctctccttgcctgctcattgccatctcctcaacccaatagtggaggcacctccttgtaaaccctagttttccatggagtgagtatcgtcgtttgaaagtaattgagctaaatattaaataatttttccccaaattgagtcatttgtgtattatggtaataacttttgatgaatctgaatatcaattgaatattacttatgtaatgtgttttctatcaataaactcacttcctttaactaaaatacatggtgtaatgacattttatattgctgtcactggatgactgattgaaaatctatgtcacttactgaaaaagtaagtacaatgaaaaaattctagcttggtactctcatctgctgaaagcctgagactaaggactgctctctgttgagaaaagtgatcagctattactacagagatgttacacaaatataatttccaagatgagacttttttcttgacctaagtgaatctaaagagaagtcaaaatagaataccattcttacagtgagatttatccttatataataactctgtatacccctacaaccatctcacctcctaacattagaacgcatagcatgttttagaactcaccgatttagagactataaaggaaccatgagtaataaggcagaatatttaggttggattcatataatgtattttctggatgtagataatgttgaagaaagctatgctttccttgtgcttgcaaaagattctcccagagactttatttgtagttattattccaacaattatttgggagaaaacacaggcaatttgaaaaaaaaaaaaaaacacctctcattcaaagataaaatagatttttgtatgttttaaaaatttatataacagatttagcttttgcaatttattttccttttttttttttttttttttttttttgggagactgagtctcactccatcacccaggctggagtgcagtggcaccatcttggctcactgcaaactccacctcccaggttcaaacgattctcctgcctcagcctcctgagtatctgggattacaggtgcgtgccaccatgcctggctaatttttgtatttttagtggagacagggtttcaccgtgttggtcaggctggtcttgaactcctgacctcgtgatctgcccacctcggcctcccaaagtgctgggattacaggcatgagccactgtgcccggcccttattttccttttgaaatactttcaaacacttcaccaaaaaagatatatggataacaaatagacacatgaaaagacacttaacatcattagtcattaaggaaatgcaaattaagaccataatacaccatcatacaccaattacaatggctaaaactaaaaagattgactgtaccaagagttaacaagaatgtagggcaaatggaatgcttatacagtactggtgtgaaaaatgctacaaccactttggaaaatagtttggcagtttgttaaatagttaaacattactgccacaggattcggctattgcactcctagatatttacctaggaaaagtgaaagcatatgttcatgtaaagacttaaaaatgaattttcacagaagctttatgtgtaatagccccaagctataaattaaacaaatttctatcaacaagggaattgataaacaaactaagggatatccattcaatggaatactattcaataataaacaaaagaatgaactaatgctactatgtgaatgaatatcagcataattatgctgaatgtaaaaaggcaaaaaaagagtgtatactgtgtaattacatctatataaaattctagaaaatgcaaactagtatacaaacggtatagtaacagagaggcaatcaatggttgcctaagaataagagataggtggggaagagcagcagggagacatcaccaaggcacaagaggtacttttagaaggtgacggataactttattatcttgattggatgactctttcatgggcatatacataataaatgtcacattttattaaattatacacttaaatatgtgcagtttattgttatgtcaattacgcattaataaagctgttgaagccaaaataattcctcccaaaacttgaatattttaggctggtctgacacggtgtcactggtgtcatgatatcagctacatttttttgtttctatacttttaactacatttcacattctaacaggcctagcatagcatgtgctaaagtagcacaagttttattaaattaggcttagcaggcataaaatctgaaaatacagaattttgcagacctagagagttattgaaagtttttgaacatctgagtgagtaaaatattctgagtttctatttaatcgaccaggaaataatgtgaacaatgaattgagatcaagaaaagatgaaatagtgtctttctaaggataatgttcaaaatgttagtataataatccagggaaaataagagaatagaatttctgctgcctaatgttggctttggaaataaagtgtagggaaaaagattcaagagatcctgtggagttgataatgctgagatttgtaaattcattgtttgttggggaataataaaggactcatcgaaggccactgggatgtgtcaagcctagatgaactggaacaaggctgagcctgtaaagtatataggtttcacgagagcatgggtttgtgaagcattctacaaatgaaaggaaaaggggggaatatgttggactaatttttgtaggtttgggagttgtctgccatgagatcaaagctgaaataatgatatggataaaaacagtcaaggaagaaattctagaaagagagagatgaaaagagaagaaatgatgctttatttagtaggcaaatggaggacaaagaggagggagagaccagtacaatgttgtagaagctaagagaactgaaagttcaagaaatagatgtattaaagattaagaaatgtcatcaggctagaaataacagagaaaattaaagatgctttcagtgagagggatgaaagaattgatcagctcgtggcaactcagagttgagagaggtttgttaaggcccaggatgactgagctcacaagtgaatgacttggaaggaagatgaaaatcccagtaattgaagagcactaacctggccctttttctttgagacaccttcaaataatattattcgtatcattccttgttataatgtgaaattttgccttagcaatttattcatgatattacaggaagagaaacattgtactttatggagaacccttcttattttattaacacctacttaaatagtgactggagaaattaatatcaccctgagttcctaggcaggaagaaactcactgggtttcaaatgagtaaaaagcaataccatcagattaatggactaggaataggctccattaccttcagctattttaatatcctagtactcaacaagaatgtgactcccttgcccttgtccatgtgatgttggttaacgtcagcagaaggaccttattgagaactgcctccctacccagccccagaagcaacaggaaatgggtatgaccagagggaacaggaagagattgttttccttttggaatgtaactgccgcctctaccaataaccactagataagacaggtggacgatgcaaacagacaacaactctcctataagaatatagttagtgtgattgagacaaaagcaagacaatcatattgtttaatgtttttggagctatttttcaattatatacaatattgcactagtcaaatgggctctcttaacacttttatttctttaatttttctggcctagttttaaaatttatggtgcattaatgtgcattgaataagcttttgtgaaataacatcctaaatcactatacttgaaaagatttcttacattaaaagcatcttgtgacaaggagcagttcgtttctttaggatttgactttgagatattttaaacagtataatgaaagtatacaccagaagccactatgtacatacatctgcataaacagatcaggatgagtttttaaaagtgttctttttgcttggacttaaaggatctaggtaaatgcaataatctgacttggtaagaatgcttgtggtaagaatgaccagctgatgaaaaggattaagaatgatggggttcaagataagctttatctttgcaaaaggattggtacggtataaagcataaataaataaagcatggaacataaaagtctaaaatttagatatttctatttcacctggcacttttcctggaagcattaaggatccaagagaagttgggaattgattacattttgaatatgattttttcaagttaagacatatactttcccactcaggagttgcttagaagacgcatttcttcaccttgcttgtcctagttttgattatctggaatccgcacctctgccaaacatcagagtcagaaagaaccagagatttaaaggttaatcatgccaaaattgagcagatgtccccctgagaaaaatctggggtgtttgggtttattcctgtggctgctgctgtgtagtattcaataccctgctctcgcccccagagtcagggccacagctgtccacaggaaatgcatcagagaggtctaatgtgaatgaatcatatgcacatgttccttggtatgtggtgatgggcataccaagggctcaaaatcagccctccctccaggccagaattggttccaggcttgtgaatgcaaactatccacacaagttgtgctgtgaaactaccctcctttcccgtttctctgcgtattgccagtaaaggaattttagtgtgttgctgggatgaaacacataatcatctgggagacatgaggggataagcatatctctgtaactgagcttagtcacatcctcatacgcgtagcacgtgcagcatgttagggagggactttcctgcccgaccgtatcagcacatggaacagtttagccagggaataggcccaattctatgttttgaaatttaattttcagtcactcagctgtagtcaattgaaaaactgcttagtgagtgactgttttcaaataatcatttggtaattatagggtattttttcttgaatgaaatttggaggtataatatttctgagtcgtatttctcccatcatcacaattaattattgcatttggcatgtaacaaatatttagatgttttaccaaattgtcaggagtggcaaatatctcattgtatgacagtaatgctacaatttcaacaagatgtccatcatcctatccacaactcaccaccaccaccactatcaaatgttccctatctcaatgaagtgacagatctatccagttgcctgatactgtaggagtcattctggattctttctactttactttcaatatgaaaaagtcgctaagtcctatggattttacctcaaaaatctctccaattgccttagatcacttatttatttttaaaatatctctcataagaatcactgtcggccgggcgcggtggctcacgcctgtaatcccagcactttgggaggccgaggcgggtggatcatgaggtcaggagatagagaccatcctggctaacaaggtgaaaccccgtctctactaaaaatacaagaaattagccgggcgcggtggcgggcgcctgtagtcccagctactggggaggctgaggcaggagaatggcatgaacccgggaagcggagcttgcagtgagccgagattgcgccactgcagtccgcagtccggcctgggcgacagagcgagactccgtctcaaaaaaaaaaaaaaaaaaaaaaaaagaatcactgtcctagccctttaacagatctccttgcctccatcctttcccatcctcctcattcccatcaatgcaacacaggcattataacggacactccgactttattgctccactgcacaaaattccaccatgccaaaaagagtaaacacttttccatcacatgcaaatctactgtaaatgcttgtttgcatttttcttacccactaaactgtggattccctgattacataatcattacatcttctgttttctttgtatctataatattctacacagagttttcttgctttttcattcaacattatttttctcatttgcttagctgcaactggttattttgtattctgtgtagtttagctgcagttggtttgtttgtttggttggttggtttgttggtttgtttagggcagttggttattttgtattctgtgcagtattctattttatgaatgtattacagttatctatccattctcctatcaatggacttttgtattgtttctacttttttgaaaattattatagaccatgctgctacagaatcttgcacatatctgcaggttttttctgagactgcacctaaaggtaaatttgttgggctgtaagtcatgtgtttctttaaaaattctggataatataaatgttttctaaaattgtttaccaaagtttaccaaagtttagttttttaaaaactatgttggcctctcaaaacttttattagcctataaaatgtaatgtttagagttatcgtttccttggaaatcaataggatctctgctggaaaaagttcatttgcatggttttaaacaagaatcatttgtattgttatgtttcctacaaattactaaactaatccatttttatcactaccggtttccaacaagggcaaatttttccgagttgtggaatagcttggtcaatgaaaagtcaaccgaaggtgcatatcccaatagaatcacataatctctggaggatctactagccagggatctgcaaactacaaccagtcagctaaatccaatagaggtcagtggcccatttccgagcctacaagttaaaaatgatcttacatttttaagaacaaacagacattaaaatgaagaataaatagaaacgaccacagcacaggagatgtgcagtctcattaattaataagtaaatgccagctaaaactccaaataaaaccaagtcttactcacctgacttcttatacaccactaatagaaatatcaatttagacactaatcagtgcatgaagtctactaagccttgtgcaccacattaatttgctgtaaatagaatgttttaaacaatagtagtgggtaataataaaacacaatgacattaattttagaaaagagtatcaatttgtacaatctgccagaagaggaaaaaaaagtgtccttgtaaagaacaaaaccaattattggctgtcttttcagtagaattctggccatttattatctgtatcaagccagataataaatgttttaggctttaaggatgatttaagtctctgttgcatattcttttcttgcctttttttttacaatgcttttttaaggatatatctatatatttataccaatgcctatctgtctatctatctataggactgtagatgggtcttttaaggttgtgttttctcatgtttttctcttgtaaaaacgcaattaattttttaatattgatcttttatccaacaatcatattactgtcttataaatatgagtaatattttgtagattactttggtttttcagtattgatgatcatactacataatttaccaatatttaattagttatttcttcttttctattgacttctcttcatctctccttccttttcctctctctctctctctctcttttccaactacaccatccaggccttctaacacaatacttactactgaactcatatttaattttaatttgaaggtaaaagaaaactatctctggtcatttttatgtactactgcattcagtttactttcttaggatttgttgttttctttttctaactttctaagttatatgctcacctcattaaattttagctttttcactccaaaataaaattatttaaggctacaaattttctgctattgatagatacctcaattgacatatattgataagaaatatttttattgcattcagttataggtttcttcacttccgttatgatttgctcttgctctttgatttatgtgtgtgtgtgtgtttcctttctttctttcttttttttttgagacagagtctcactctgtcacccaggctggagtgcagtggcatgacctcagctcactgcaatctccgcttcccacattcaagcgattctcctacctcagcctcctgagtagctgggattacaagcacgtgccacgacacccatcagatttttgtatttttagcagaggggaggtttctccatgttggccaggctggtctcgaactcctgacctcaagtgatcctcccgcctcagcttcccaaagtgctgggattacaggcatgagttaccacacctggccaatttatgtgttattttaaggtgtttgtgtgcattgtttaacaatttctagatatatatgtggttttatatttatttaatcatgttaaggtccaaaaatgtgttatgaaaagtctttgagattcactgtagcttatttaatagtttggcatataatcaatgtttataaatattccataggtgcttaaaaaaatatacagtctccaattcttgggtgaaatgttctatatatttctattggattatcttttaatattgttatccagatcttctatatccttactgatttgtgcacttgacatatcaaatattgagaaaggtgtattaaaatcacccattaacatgggtgattttacccttttaattcttatattattttttgtagtatttacttaaaatttatgatactagatgtaatcaagcttagaattttatcaatgttatcagcctgctgaattgattaatctctttttttggtaaaattttagttttattacaactttactataccagcaatccttcacttatatttgtttgatatattttttgaactattttactttcaactatgctatagccttatgttttaagtgtgtctcttttaaacagaagacagctgaattttgtttatttgtttgttttatgccaatctgtgtcttctaactggagaatttggtccaattatatttattgcaattaatatattttgatttatttctagcattttatgttatacttcctatatgttcttctctaatactttttatttttctgtcctcctttagattgacttatgtttaattttgttttttctttctgcaaaacttgaccttatgcactctatttttatcttttttgtggttgtattagtactttttacatacataattaacctaataaagtctaaagtatataattaatcaatatcattatccttctttccaacaacataagtaaggacttcattttatttatttagccagggtctcactatgttgctcaggctggtctcaaacttgggctcaagtgattttcctgcctcagcctcctgagtagctgggactacaggtgcacaccaccaggcctgattgagtaaagacttcagagtgctttaattctaattaaactctcccagcttacacaccccgttgtctggttttttagttgatcttttttatcaccattcttttatttttgttaatgtttgcttagatttatttatgttgttactatattctttgcttatcattctttctcacatatcagatcttccataaactattattttgcttcctaaattcattctcaagaagttcctttggttacagtcagtggtgggaagtttttcaatttttattttgaacagtctagcttggactactttaccatagatctttaacttggaaatactcaggctacacaattagtataaattctattcctacatccatttgaagtctggccaaatcatgaattcttacagaaagtttttgttgtaagtttaccagcctgagtcaggactgaaaaaagcaagtatatctatgtttcttgtggaagagtaggggtgaggagtcggagttggggctgagtttcattttttgttagcccacattttcactttgccctggactacactttgtatgaagtcccttggcacttgcaagtcctgttaaagtgaaagctctaggtcgcttaagtccagtgaggcctcttgaaatggatagataccaccaggacagctactgttttcagcactcacatatccttcttgatttttttgtcggtattacaagaaagacatcttgatccagaccccaaaagagggttcttggacctcttgcaagaaagaattcagaatgaatccataaagtgaaatcaagtttattaggaaagtaaaggaataaagaatggctactctataggcacagcagcagcataggcggcttgactgagtaaacttacagttatttcttcattatatgccaaacaaggggtagattattcatgagttttcagggaaaggggcagagatttcctggaactgagggtccctcccctttttaaactatataggttaacttctggatgttgctatagcatttgtaaactgtcatagcactggtggtagtgtcttttagcatgctaatacattaaaatttacatataatgagcagtgaggaccaccagcggtcactttcatggccatcttggttttggtaggttttggctggcttctttacagtatcctgtttcatcagcacagtctttctgacctataccttgtgccaaccgacctcctacatcatcgtatgactaagaaggtctcacctcctgggaattcagcccagcaggtctcagccttattttacccggcccctattcaagatggagttgctctggtccaaatgcctctgacagctctctttgtttttggcttctaagattttcttttacttgcctgctggctcaatggtgcatataaaaatgcactatagcatttttaaaggacttaaaaaaattcatcaagcatttgtgtcacacacagtggtttttaaggatccattctgcaaactgctagaaccaatgcattccattcttaataacttatgtatggccaccaggagggctactttctcctccattcctataagtggccaaactgagtgatcttggaccacctcagtaagcctcagttgtctaaatttacttactgtaaatagttggggactctttaagatcccttaaaaaaattatctcaaacttgcacaaacttctgggaggagatttagcattcttgatttaaaaacaaacaaacaaacaacaacaacaaaaaccctaagtttctaatcaactttaatgaaatcaagatattgtaagggagatgtgggtagtccaagctacttaagaggctgaggctgaaggattgcttgagcccagagttagagaccagcctgggcaacacagtcagaccctcatctaaacaaaaaaaaacgaacaacagcaacaacaacaaaaaacagaaagaaaagagaaaaagaaaaaaatatttgttctgggaaaccagttaccaatccatactgtcgactatcagctgaaagtcagagtctaaaattaactctaagtaggcattttttttttcttttgtcatacattttaagtaaatccttttttttcctttaaaagagtcctcaccgccaggcatgattgctaacacctgtaattccagcactttgggagaccgaggtgtgtagatcacttgaggccaggagtttgagaccagcctggccaatatggagaaaccccgaaagtaaaagtacacacacacacacacacacacacacacacacacgcaagcaaaattagctcggtgtggtggtgcgtgcctgtatttccagttgctcaggaggctgaggcaggagaatcgcttgaacccaggaggcagagatcacaccactgcactccagcctgggcgacagcacgagactctgtaggaaaaaaaaattccagttgagatgctttccagggcgctagtcaagccccgcatgcttatttgtgggagtgaaaacaccaatatttcgggattgttgtgaggactaaatagtgtctgtaagatgcacagagaaagcgtaaatagacgtcaatagcacttgttaggtctacacactccatttttcctctatattaatcgaattatttaaagattggttagctttttggggaaatgtctctccattgtattccacttattaggatgaactaccttttctccttgcttttcagctttctctgctatgaaaaagatggaaaattttttagcacaaggggactcttctcaagcagcaaatcattttgatattaaaaacagataattgcaaacccagttttatttcagtatgaattccgcagtggagtgtgaatatgtgtgtgtatgtgtgtgtgtgtgtgtgtgtgtgtgtgtgtgtaattacctgtgattcaaaagaggaaagggatcagtattaaaggtacttgtacactggaagcaaaaaaaaaaggaagtttagttcctctgagctccttggcaattatagctgctaaaggtagcttttacaaagaaactgcctttgtgcctaaagtatttatttccttgtttgtatttacccctttgaggaggaatcgctgtgtcttgagtgaaaggggtacgctgcttgcttgcattaaactgtgagggtccaggcgcattacggctgatttcagtaggtagagcagacacactttagtttatttttctctttctcactccccaccctcaacctccgatgtacacacgttttaagattccctgaagtcaggaggtgggagcggagagtttcagttcagatcttgacatgagagtacttcgaccaaggaaaagaaagggaagaaagagggaagcggggtggagaaagcaggagcaaggaaggaaagaaggaaacggggagggagagtaagaaaaaagaaaacgaaggagggagggagagaggacatttaaatgaagaaggaaggaagcttggattcagggaggaaagggagcgggaaagagagcgaaagaagagcgtgagaagaggcaagcattatagtctccggtccacaggggagagatggagccccctcaggactagagaatcccgaagagcccgtgtattgttttcttgaaagccccgaagctaagcaattctaaaaatgtttagcaaagcccttttgggaatggtgagatggggggtggggaggatgggacattttcattgccaccgcccgccccccgtctccccggccccctcacatgaagtgactggatttgggagacctagcggaaaccttcaggtcacccagggaactgctcctctctctggtcctgcagcggcgaggcggggtagggggtggggggggtgggccgtgagagcgccgagacgcgcggggcgcggagatgtgcaagtggcgaagcttgaccgagagcaggctggagcagccgcccaactcctggcgcgggatctgctgaggggtcacggtgagtctctgtgggtgcgggtcggagggatgcccaggtgcctcgtcgccccacggcccgggcggaggcgggtccggaacctcccccaagtccggcctcagcctggagcccgcgcgccttgggcggatgcacggactgagaggcgcttggctgggctctcagcccgccactgccacccggccccgtgcgctcattggtcgggatgtgtcggctcagcagcctccaacttctcccgaatcccactggtgagtcccaggagagcgagctgagggagaaaggtccaaagggcgcgagcgcccagggcgctgggagcccgtgggacgggcacggggagggcagagccagccgaggggagcggctgccgggaggtgcgctgagcagggtccgcagctaaggtccagcgcgatccgagcgcccaggaccctgcggccgtggaggaggcgtgccctgggaaggagccgctactgggacctgaagagtgaggggagggagaggggcccagagggtgacctggaggagggctctggaagtcacgtcaggttggctcttcaggttcatttccatagttccctgcggcctctgccttggggagttatgttttgttaccgagatccgcgctaccagattgcaccggggctgatttgggggctgggaatttgccattctgctgtacagacactgatttttttttcttctttttaaaaagcaaggtttgttttcattttggtttctgtcggattttctcatttgtaactcacttttctatttttacttttcttaaccggaagatcttttcattatcccacctcttcatcttgcttttaacctgatttcctattatataattaatgcttaaatctcacaagggttggtcggtgcggggctggtgtgtccttttgtagatgaaagtttaagacctcttaactggtttcagtctatttgtctggtttcaaaataagggtaattgcaaccaaatatccctctttagcttctcgatcaagtcgattcctcccccatatatgattcaaatggcaattttattaaactgaaaactagtacctgacttgcagcgtcagcatttggaaagtgcttgtcggcaaatcgactgtatgaaggcgtgtagcttcatcccctgccatttttgtgggttctagcactttaaaaaattgtctggtaatttcttggacttaaccctgtgtctttggttgtagagcagcactaaccaggggagtaatatggttggcacttcgtgtccagaactccgtatttcaggctgggaaacacctaattaatgtctgggaaacaagaagatgatttatcctgagtacctctgtcctcagcttctgcagacacagtttaaatatggaaactgtttctccttcttcctgtgcctcagtttccatagaacaaactgtaattgcatagcacagcttcaggaacctgcagatataagttaatgttataatgtgcagtgaagatgaaaactgcttagctaagtctaagtctgtaagtcaatgagatttcctttttaacaaatcagttatccaggtttcctgctttgactgtctgatatagtaatgcttatgctcaactggtataagaattgctgctttacattgctttgaaattaagcttacacttaaaatagtaatttattctgttggtaatattgtcgagctgaagtttgcaggttcttgttatcttagacctcctaattctctattctcgtctgtggcagtgtccacttttccgtttaaactttttatttaacacatcttcagttgaagtgaaatattttaagaatacaggtatgtttttgcgtaccctgctttatatgggactataagcctcaacttggtattttttttttttttgtattcttttgtttacttgtcccccttactcttctctatgggattgggtgtggttaagttggatattcaggtatttggggtttagtcatatgttccacagtgagattccagatactgtcccctgatgtcttaaagaaaaattgtgaaccttccagaattaactggaaatgaacgacaaagttaattaggagattaaacttgcatcatttctgcttttgctcaatgcttttgaaaaaaggctactaagagcaaaagacttcctttaagaatttacagggcatttacaagagggggagatggaggaagactttgcaggtgattcaaagattatattgttttgatgcagcttctgtcactgtcttcatttctctgtaactgtttctgcaaacttgggtgctgacccattaagagcccagctgcttcagtacccagtctcaagggtaaggaggagaagccaagggaaagtaacttacagggagaaagaaatgcttatccactagctttactacaccacaaggcatggagtttccacagagcacctgtaatttaaccctgaggctgccctggttcaccccttcgctttactttacagggacactgactgtcatttctaaggaagaactaagaaaaaaaaaagtccttttataccagtaaaacatttctctacattgtcttctgacatatgcggggggaacaatattcaggaaagggaaatactttagcaaatgtgcttaacattcaggtgttctttaggacagtcatgaaacatggggagactgggagaattattattgtttacctctctgtaaagtgtccagagtattattaaatttgttcccctctttcctttgcccaaccaatacactattaaaataggactacaatcaatgcaattccatatcataaccccaggggtggtgagactaagccagcatgccttacataaccattaagtaagacattttaacattcaggtacattacattccacttttatttagcagacacggttttcattgtgtaataaaatatttttatttgatagtctgtccttgcttatagcctcatgtaatcaaggggacagcatgtttaagactttgtatccagaactttaaggtctagctgtggttcgcttattaataattcactgggaaggttaatttctagttttctgctgggtctcccagaccatacttcaaatgtagaatatgtttcttctttctcctatgcctcagtttccacaaaacacacccttagagaattgtgtgtgttcaacaaagatctttaactataagagcatttctgagccgccacttcatcctgggaccaaattctaagagcaatttgtattgagctataaacagctaatctgctagtttaagatgttcttttatacagtcatgcagaaaaatggaaattgtgtgttctaatccttggagactggctgataaagtgtcactaggcccctgatgaaatttaatatttaggcttatatccccttaattttccccctaaatttctacagtacgcttttactgcatgatgatacagctttattttgaacagtgaccaaatgtgttctttacaaagaatattgacgagttgtgtagtcttgaacacgttgcctgacttctctgtgccccagtttcctaattctttattctattctgtggcagtgtccactttttggtttaaagtttttaacacatctccagttgaggtgaaagattttaggaatacaggtatgtttttgcataccctgctttatacaggactacaagtatcaacttggtaactttttgtactattttgtttacttatcccccttactcccctcttaaatgggattgggcgtggttaggttggatattcaggtatcttttggtacagtgagtgaccattttcagaatgttgtctaaccagttaatagatactggtatcagtagtagtagtaattttgaactgtaaaaataaaggttgtttttatgactaaaataaactacttcatgtgttcattcgttttgctgtttatctatattaatatttcaaattattgcttagtcaaaacctcaaggtattagtcactggtttttgagcttataaaggaagccactggagcaagatataaaattaaccattgatgttagtccagagttcaaaagggtgagtttaaaactttcttaatgatggtacagcaattatttgcttataaactgctgaattaatcctacttgagtatttaaccaagtcttactgtctaattttgctgagattttcagtgatataccaaagcaaaacaaaacaaaacaacagcaacaaaaaacaaaaggttgtgactgagacctgtcaaattcatttggctctatatactttgcattcagcaacaaaattttgacttctcaacagcaaaaatgtatttctattttaaaataactgagccttttacttttatccagccacattaagcatttggacattttcttttttatttatttgtttttcattattagtattttcattttttgcagattttaggtgatgggcaagtcagaaagtcagatggatataactgatatcaacactccaaagccaaagaagaaacagcgatggactccactggagatcagcctctcggtccttgtcctgctcctcaccatcatagctgtgacaatgatcgcactctatgcaacctacgatggtgagttactcccacacctgtgcatccataagtgcaaaagagaaggaaatcttcctccatgcttttaccatctatccaacgaatgtgttaaggatagaggcacttaaagactgacaaagagattcatttataaaatgtaacatcaatatgtcaaaataattaactttgaagtacggtgccttttatgtttgagctaagttattaattgcaagtatatttagtgcgctcacgcttacttatgaggaatctaaagtatggttttatttgattaaaatatacacaattttatggccagctttagtaatagtcattagtcaacttttgttgtgtcattgaaattctaaacggcttcacaggaatttaacaaatttaatttgagtcttggaagttttttacaacaaggatgaaaaaagattgattgtttaatggttaaaaaaatgattaccaagcaaaaacaactgattatttcaatttaataggcctggggcttcgttggtagagaagatataataacacatttttcttcataatcaaaattttaaatttagattttacttattttattttcttatattttttctaaccactgacaatgatatataatgttcagtttttagttcttgctttaagaaattgcttatttaattggcagtttttaaaagaacaaaagaaaaatagaaatttaaaaatttgtgttgccaatatttatgtatattctctcctttttctagatggtatttgcaagtcatcagactgcataaaatcaggtaagaaatggtttttacgtgtaatagttatacaactgatgtataatatttaaaattaaatgctaatcttaatttgctttgtttacacttttattcattgtagatcaattatttatgtgtctggctctataatcaatggaaataaaaatatatttaagtagtagattaattaacttgtttactctgaaaaatatattactattttcagccctgggctgtatagcagggcaatagaaaactatatcgctatttgtatggagcttgccatgtagttgaagaaagaaaatgaacacatatgaaatggtaagtttcgtatcattgtgttaaatgtctcagtgcacctcactaggtgggtgagaagaagggagtgagatgtaggcatgtaaatctaggtggagaagttaaaatctgggaagaaatttcattttatttattttttttattttttatattttgagacagagtctcgctctgtcgcccaagctggagtgcagtggcgtgatctcggctgactgcaatctccgcctcccgggttctagcaattctcctgcctcagcctcccaagtagctgggactacaggtacccaccaccacgcctggctaattctgtatttttggtagagacggggtttcaccatattgatcaggctggtttcgaactcctgccctcaggtgatctgcccccctcggcctcacaaagtgctgggattacaggcgtgagccaccgcacccagccttaaatttgggaagaaccttgaagcagggctagaatttagatgtggcggtgcagaagagggaattccaaacacaaaagaaagaaactatgttattgagaagtagtaaaagtgtacgcttgatagaaggacacattatggagaaccttgaaatccatgtttagccttgatattgtaatacaggagaaacagatatttttgaacagaggagtgatcaggccaaaggtgaaagatgattctgcgaatgtgaggttgactggattgagtgaaaaggagggcaggcaggtgggggctgcttctgtactccaagtgtaagctgaagaggttggcctgtggtgagagaagagtactattgagataatggggagggagaattgggtgactcagtagaactgacttgctaaataaaatgaatgaattgagaatgatgccaagttttaaaacccaagggactaaagagaatggaggcagcccacacagaaatagagaggttatgaggtggatgtggatgtgtttggtctaagatgaaaatagacaggaggaaggtagagatgaggtttaagaagctggaatttggatttgagatctgtcagtttaggagtgatagtggaagccttggaagtatttgagttctcaaaagaagagaagaggttcaagggctaaacttaagaagaggttcaagggctaaacaacatcaatgattagaagagaagaaaaataagtcagagcagaaaacagagaagtgtatgaagctatataaatcccatcaattggagtgtggtgaaaatgggagtatttcttctttcttcaagaaaaaggaaggtggtagctgagggcagcacctgggatatgaacacaatatttgtgtcctttaacaagagattctaaacctcctttctaacatctatgtgtcttataagaaataaataaactgttccaaataattttaaccattttctgctggatatttttaattttatttatttatttatttgaggcaggatcttgctctgtcacccaggctggagtgcagtattgtgatcacagcttactgcagccttgatctcctgggctcaaggcatcctcctgcctgagcctcctgagtagctgggactataggcacctgccaccattcctggctaggttgtgggttttttgttttttttgtttttttttgttttttttttttgtagagacagggtctcactatgttgcccaagcttggtcttgaactcctgagatcaagcagtcctcctacttgtcttcccaaagtgctgggattacaggcatgagccactgcacccagtcttggatattctttacttggatttttgttattcactgaactttgcaaaaaaatgacgggaaaatatctggcaattctaggttatagtctaatatcctgaatctgtgccctttggtttttttttttttttgtatcgttttttgatggatttttttgctctgggtcacaagagcaatgactagacaccctgagatgtgatgtggggagcgtgagggagacttgatttagatgttagccatttgctgctcgacatagtaagtttttcccaaaaacgaagtttctttattccccagggaaatggctgcacaggtaccttggctgggggatctccgtggtcatgtgcaaaagtcagcatgtgcccaagttgtcaaagttaacgtttacttcctccccagatcctcctatgcttcctctctctaccagctaccctattatatgctcaggctgtcctgtttcgggaaacttccacttacatattgactactaagggttaattcctctgtctttaatacacttgacatgtctctttggtatcttaatctatagattctctcttctctcactatttttcctttttctcttcttttccttgaattttattttcgaagaaactggattttttgactaggtaggtgtatttctataaacgacaagtgattttgcctcagagatctaggcaggtttttcctcccaaggagcaatgtgacattcagaatctggaatcttaaatgtgacttaatgtttagagataggatttttaaatagtgtttggcaagtctcaactcactaaaatgtatttaacctgtatcctttaattgtagcttagaaatcaaaccaaatgtaaaacaccttgcaggatgtatcttggcagagaaatgtatacaatagaaataacttcagtggtaaacaaggttgctgtatagctgtatatttttcttcattctgctctgttggttcacaagccattagaatacttgttcacattggtagttactattcttcctaggagaataaataagatgacacacaccctcatggatacactctgcatactcataaacacacacactcgtgcgcgcacacacacacacacacacagtcttctgctggttaggaaatcttttctgccacagaaaaatacaactatttcttttagaagttgttgcaaattaggaaaaccctagaggaaatcttggacaaaagcaagtattaaagaagagtggccagagtagagtagatggaaagaaaaagaaatgtgaaaagagaaggctgggcacggtggctcacgcctgtaatcccagcactttgggaggctgaggcgggcagatcacctgaggtcgagagttcaagaccagcctgaccaacatggagaaaacccatctctactaaaaatacaaaattagccgggtgtggtggcgcatgcctgtaattccagctactcaggaggctgaggcaggagaattgcttgaacccaggaggtggaggttgcagtgagctgagattgcgccattgcactacagcctgggcaacaagactgaaactccatctcaaaaaaaaaaaaaaaagaaaagaaagaaatatgaaaagagagatgttgaaaaaatataaaatatcttaccagcaagtctataggtcactttaagagagtgggtgggttcaaacctgagctcagaaattcttgagaatgggaaaagcaagtattgacactcagggtgcttacattatatgaaagatggccccaacttgaacctttcttccagtggaagggaatgtcatagcaaatgtacttatctttgattctttgaagtcaaggaatacagaagtcaagccataccaagacagaagtaaaatattgcagaaggctgtttcaaatctgtttggtgttacatatttaaaatctgagcatctaggatttaaatatttatgatgtacataaaatgatgtttatgtatactttaaattaacttgcctatatgtgtaatgcatcagtatgaaagattacaccagacctaaagtaaaacaaataccacttaagaaataacaacttaaggcagggatcaaaatgcttcaaagtattattcatcgcttatttaccctataaggtcatcaaaaacttagagttataaaacttgtatgtgattttgcagacttttccgtgtaagtctgaatcctgaaactgatttccattgcattgtaacctccctaacttagatttcaaggaatcttgtgctttaaatcagggtttctcaactcaatcactattgatatttttgtgctagataattcttcgttgtggatgctattctgtgtattataggatatttagtagcatccctggcctctaccaactagatgtccagtagcagtcctctcctagttgtgacaaccaaaaaatgtctctagccattactaaatgtcccctgcaggcagcacggtcacttatgactgggtaccactggtttaaacggtctcaagatgttatcaatgcttccctcttaacggtaggcaggataatggcctctcaaagatattcacacccaattcccagagcctctgaatatgttgccttatatggcaacatgcctgtaatcccagcactttgggaggccaaggcgggtggatcacttgaggtcgggagttgaagaccagcctggcctacatggtgaaaccccatctctgctaaaaatacaaaaatccaggcatggtagcacgcgcctataatcccagagggaggagaattgcttgaacccaggaggcagaggttgaagcgagccaagattgcacgactgcactccagcctggaagacagcgcaagactctatctccaaaaaaaagaaaaagacaacagagaattgaggggtctgcagaagcatatgttagaagtgtggtcctaaattatccagaggccagagaagccaagctaagacgtgatcaatacagtttacaagagaaagtgggaccacctccacctgtatagtcatgcaggttgtacactgcatatttgtcgatggcagccttgacagacaggcttgtggaacatcaagacctggatgaaacacctctcagaactgtccactccttttattttaattctgcacataccaagaaaacttttgatgattacttaattattaatacaaggagaggtggcattctgttacttgaaagatattttcatcatggtgagataatgcacagcggtccccttcttatcctctgaggatcccccaagacctcagtggatgtctgacactggactgaaccctatatatgctatattttttctgtatacatacctatgataaagtttaatttataaattagacaaagattaataacaataattaataaaaaataaaacgattataatattattccagcatcactattcttatggtttggggccattattaagtaaaatagggttacttgaacacaaacaccatcatcctgcaacagttgatatgataataatggagaaggctccttcgtgactttcatcatgctactcagaatggtgcgtgatttaagacatatgagttgtctgtttctggaattttctatttaatatattggactgtagttgaccatgggtaacaaaccatggaaagtgaaaccacagatatgggggagactactgtacgcacatactgatttaatcagatttgtgtgctttgagctatgaccctggaactgaaatgaagcttgcaaatgtctgcaagggccagatcatggtgatgccctaggtgatgcatcttggcaacagctagccttctcctggctgtcacaaggcatctctgccttcttgcctgttaacaccttgaaacctccatgaaggaaaacagcacaattaggtaaatacaggaaggactgatggctaactcatgggggctactggccctgtagcagccttttagtgtaggaaatgaggctatttcattatgtagttaagtttggaaaaaatccttcatggaataagaaagcagcagacatcttagtaggaagaccactgaagcacacctttgttaatttaaatgtggcatgtggcaatttgctttgtgtggcttccctggcacaattctcgtgaaaattgtgtagggatattaccttacatttatccagtcaaaattagcatctgtcaatcagatcctttccaagaaagggaatcagttatatcataaatacacaaatatataacatgtgttttttaccctccagggaaactttaagcaagtagtacaccatcattttttaatgaatggtcaagaaattgaaaacatatataagttgagttaagcagttaaagggaaagacaattagcaatgcctggtaagctaagtggtactccaaaggtttattttatagctacagaaattatctacatgtagagggggtggatacaaactagcttagactggggtgagaatcctggtttgacatttaacattttagaataagagatatagaaagattcctctgtagttgaaggatcctgttttgtcctactcataagcaaatccatggggtagcaaggtgctttctggtaagcctttgatatgatatgaagctcaagttgataaaacagattaattgaaggaaattgaaaaatacgcaatttaaaaaaccataaggagaatgttgcacaagcttttgaatcctgtaaattttcattctttaagaccattcagaaaaggagattttgtcgggggccagtggtggcttgttttgatcctatttctgaaccagctgaaaactagaatacgttctttctgttcaaaacatcctagatgggccacatattagtcaggccttctccagagaacagaaccaatggtatatgtatataaagtctcagtatccaaaggcccaagaacctggagttctgatgtctaagaacaggagaaggtggatgtcccagttccagaagaaacagaggatttcccctccctctgcctcttgttttatctaggccctcaacagattggatgatgctcagccacaatggtggtagagtgtggatcttctctactcagtccactgattcaaatgccactcttttccataaacatcctcacggatgcacccagaaataatgctttagaaataatgctttatcagctatctggatatctcttaacctggtcaagctgatacctaaaattaaccaccacaggctacagtgaaaaagatagttccaactgtgagtgaggatgcggagaaactgaaccatcatacattaatggtgggaatgtaaattttagtacatctggatcaacatgttagaaacattttgaaaaacagtttgataatttttacaaaatgttaaatatatactttccatacaacccagcaattctactcctaggtgttacttaaaataaatgaaaacacatatcctcacaaggacttcattacagcataatgctgtttttataaataatttataaaagccaaaatatggaaatatcccaaatatgtattaacaggtgaataaacaaaatgccatatagctataaactacgataccacacagcaataaaaaggagcaaactactgttatgtgcaatggtgtagataaacatcaaaaacattatgctgagtgaaataagccagacacaaactgcatattgtaaaattcaatttatatgaaatttctataagaagcaaaactataggggcagaagacaaatattggttgcctgaggctggagatgaagcagggattggctgcaaatgggcataaggggacttcttggggtaatggaagtgttctaaaattggactgtgacaaattctcagctttttggctaaagatcaagtgtaaattggattgtggtgatggttgcacaactgtgtaaatttaccaaaaattaatcgggtgaattttatggtatacaaattaataacccaaagccgttaaaaaaaaaaaagcaaacaaaaattcaccttcattctttcccccatctctccaatgtccatttttacatagttatctcatgttttgatcttatgcttgctattgtatgttgagtccattgagctccatttttgcagtttaaatgattatatgtagttttcaatgtagttttcaaatcttcactaaataaactcaagctttttagtttgagtgagcctctattatttaattatattagcaatatattgacgaaaagtctctggaaatagtaaatcaactgggaagttaaaattatttcaggattaggtgttggaagtcctgttttcaccccctggggtttcacttacagaggaagtcaaagacatatgtgtccaggtgtaccagccatctggatcaaagccagaccacttggtctaccacagagcagttagcagttcctgcttctggaaaaatgtgttggtttttcacacaggtgctgcgagatgttttccttttcaccttaactgatagaaagtcaagagccaggacgggcgttttggctcacgtctataatcccagcactttgggaggccgaggcaggtggctcacgaggtcaggagttcaagaccagcctggccaagatggtgaaactctgcctctactaaaaatacaaaaactatctgggcatggtggtggacgcctgtaattccagctactcgggaggctgaggcacaagaattgcttgaacccaggaggtggagtttgcagtgagctgagatcttgccactgcactccagcctgggcgacagagtgagactctgtctaaaaaaaaaaaaaaaagattgaaaaaaagaaaaaagaaaaagtcaagaaccaaatttgaatttaacttgaaattgtaggacttctttgtataaacttgcttcatcagctttattcctattcctcttttctttctcatacaatgtatattagtttattttatgtatccctctaaggccactttgaattattttaggaagaatgtaggttaataatcagatgaatagaatataaattccaacaactgatatgtgcaggagaagggctgttaaattataaactttatttcaaagagatgcaagtgttatgagtaacggaggcacaatttttggaagcttactgcttctttttccactaagccaacttttagcatgggagatctgggatgtaagttttggccacatcctgtgtgattggtatgagatcctaattaagtcagttcagctttctgcatttcattttcattatctacaaaattggaattgaaagtgtctcattttacagggaaacagcaaagactaacgacagcctatttcatgttacacgcccttcagggagatgcaccataggtataatgcacagataggattcatagacatcttatttcatgaaaattgcaaatgcactatttaaaattttttattgagaatcaaataaaaatcaaatcaaaaggcgaacagtgtatttttaaagaggaagttgtagccagaaacagagagaaagaaaaaagagaatgtggtacattttacatattctcaaataaaaatgtgtcatcctttatgaacaacatttgatttgattgctgtgctctgtcttagtatgggggtgacagttcaggctttgaatcaattagaatgagcacaatcagaaatgaacacttgaatctgtgtttcctgtaaagaaaagcctaccatcagggacaccttagtttgtaaacctagctaatctgcactcacccttgccagtaccccttttctcacctctgattaatcccttgaagtaagtaagtcagaggtctgcatcaggagaatgactagatccttggtattcaatgcgtggtccatggaccaacaacagcagcagccactgagaatgtgcaaaaatgcagtctcgggctccgcctcagacctactgaatctgtggctgcactttcagtagcctcttcaggtgatctgcaaaataaggttgagaagcactgaggaatagtgattttcaaatatggctgcttattacaatgatttgggaagcttttgaaatgtacccatactactaaaccttccattcttcctgggcacacaaagtttccatttcttcagtggagtagtttctgttatgtgttaggaggaaaagcaatttaagtaaatgaatagatgttaaggggtataggaattgcctggatatttgcatttttaaaagaaggtacatattgaccaactgattgctttaacaggttcaatttcagactgtgtgctcagtgaagactttaagttagagaggagtgaagactttaagtcagagaggagagacactgagcctgattttctgcttatcgtggacaagctgaacctggaatatcttcctaaatttccccagtgtaatgcaggcatgctatttctgtagagacattagaacaactttttgcctcttccattcattcatttattgatttatctattcattagttaattaattttattttttattttttttagaggcagggtctccttatgttgcccaggttgacctcaacctcttgggctcaagcaatccacacgcctcagcctcccaagcagctagaacaacaggcacatgccaccatacctggcattcatttttttttccacaaaagcattaatcaagcagcttctaaacattgaacactagacattggaaatatgaactaaaataccccctgccgtcaggaaaatgaaaacctggtcagtgtgacagacataaacaacattaccatatggtttgataagtgctatgatggtgataagatttgtgtgctacaggtgccctgagagaggagcacctaaaccagagcgggtctgggagtgggcagctaaagtgatagcaatgaggccgggaaagcagtcgcacttcaccagctaagttctgaaggataattgaattgcccaaccagtgggagcagaggagagcatgtgcatagtctgtatgcaagatggaggcaagagctcaggaagtttaggacctactagtggttcatgatggctgggatgtagaagctagcaagacttgatactagagaagtaaccagggcccaggtcacacagggtcttatatgccatgataaatgggttgcattatctcccgaagtctacagaaaatgaataaaattaaaatgccgcaggggacatctaagggattttaaatagggatgtgtgacattgtcaagattggctgctgtctagctcaagcctggtaaagtggaggcaaagatttacccaaacaaaggaataacattttggtgcccctggtgtgtgagagagcttggcaatattgagaaactgaaagaatatctgtaaggctatcatagagggtgtgtatgaagatatgagagtggaggcaaggagaagtgttcactattggcaaaagaaataagcaggaattggattttgtagtctgtgttaaagtgaatgcacttccttctagtagcggtgggaggtcacagaaggaagggttttaaatgacgcatgactttatcagaattattgagaaagatcactgaatagaaataaagaatggctgtgggcaggaaattgggctactgcacttatttggatgagtattatggttgcctggatttgaatggcaacagtttttattgttgttgctgttgtttgtttgtttgtttgttttgagacagggtctcactctgtcacccaggctggagttcaatggcacaatcacagctcactgtagcctcaacttccccagactcaggcgatcctcccacctcagcctcctgagtagctgggattacaggcatgcaccaccacaccccgttaagttttgtaattttctgtagagatggagtttcaccatgttgcccaggctaagaaatggacagatttgagaaatatttactgggaagtagaattcataaggcacaatgtttctgtaaataggtgaggttgtgaaaaggaagtgaggaaaaggtaactcaagtttctggcttggtaaattgggtgataagtcagctgttcaccaagctagggagcactgaagcagagcttattgggtaataggctgggaccaatgcagtgaagagttcactgtgagatagtttaaatttgagatactggtacatattcgatgtggtagaattcagggaagatggtgttggaaataaagattcgggggtcatcagcatgtggatgatatggttgagatttcttagggaggaaatggagaagagaacccagaattgcatcacataaagcaacatttaaaaatgagaagaggaagaaactccaaaagaaaccgagaagtaatcagagaggtagaaggaaaatcagcgaagtgtaaaatcaccaaagcaaatggaggagcagctgtccaaaattagagagtgatcattggaattaagcacagctgagaggttgagtaggctaaatgttgaaagcagaaaggaagacattgaagattcaggtgaagatcaggtggaaaattgatggattttgtccagaggaagtaaaagaggatgtatatccagagaaaagaatataggatgattccgagataaaggatggcctcctcctcccccttttatttaatactagggagaaagaagccaagatggctgaaatgcaaacatgtttggaagctaggagggacaggaagttgaatgggtcatcatccagttgcctttgtgaagtaacaaacaaaaatctccgcctgggagtgagctggtagagaaagtaagtaaggagagtatgaagactggaaagtgtccatgtgaggagtgggccatgcacacagaactgatggctctgttgaaatggaaggctataacttgaaatggcattaaaccaggcagttgtggggtttctccagcatcaccgataatggcttcaacagatattgtcagcactgttttagatgctaaggatacttagcacctaaacgcagagtgagcaacacaatgtccctgcttacaggagcttacagcagtaaaggagacagtaaataaacacacacacatataaaaaaacattattagatagactagagttggaagggaaaaggaaggcagctggatcaattcagggtaggctcatttgcagggggcaagggaatgaaatactttggtgagatgatggtttcagggatggcaccacaggatgtacactggacagaagatataaaagaaaagtaaagtaaaaaatagagtggctggctgggcgcagtggctcacggctgtaatcccagcactttgggaggccaaggcaggcgaatcaccaggtcaggagatcaagaccatcctggccaacgtggtgaaaccccatctctactaaaaatacaaaaaaattagctgggcgtggtggtgcccgcctgtagtcccagctactcgggaggctgaggcaggagtatcacttgaacccaggaggtggaggttgcaatgagccaagatcgcaccactgcactccggcctgggcggcagagtgagattctgtctcaaaaaaaaaaaagagtggccatggggtgagagttttcagtgaagtcgaggaacaggtgtagagggaataaagaaatgaaacaaacaaacaaacaaaaaacacttctaagaatcagaagattcttattggagaggggggttactcgagatgaagatttcagaggtacaactgttctgggtgatgagaacattaagatgtcgtcatgaaaatgtgtagactaatgtgaagtgaaggtgaaagttaggagagttcagatggtcaagaaattcttaagctagagtgtagcagaggttgtccacagggtctctgatgttacatatcaagatggtagaacttatgtggaagggcagactgcacaaagtgccagagtcttaaacaagcagagatgaatgcctctggagtcagtagaagacagagataaagtaggtgaggcggggatggttgactggcagaagcttaaataagcagagtggacagtaaggatttggctattgcaccaagtgataacagaaaactagttttgcttttccatgttggggcaaggtggagggatatgccacctgatgggattagttcatatggattagtattttcagtacacgtgttgtcatatgtaattatcactcaaaagggtaagcagcaactaataagaagaggtgctggagggccacctgtctggcatatagtgtgggattccatttgatacaattacaaatgaattcatttttactcatttttatcttttcactatcctagataaaaactcaaaatgaatcaatgagttcttatcttaaaacaatatgttctgtttaaacatttctcagcggtataatcttcctttaatcttacatttcttcaatccagaggagtccaactacagtgccttcaccgtgaagctaatgaaaagggagttggtccactgtgtagactagactagatgattgcgaagttaaattgaagtaattgagcaggtacccaatagccagcagcggatttgtttctctgttcttgatgcttaagtaaaaacaagcaagccaagtattaaatggtggagctcctgacaacacagcttcataaaaaagaaactgcttgactcaaggagtgtgtccttgcgatagtttgccgagaatgatggtttccagcttcatccatgtccctacaaaggacatgaactcatcctttttatggctgcatagtattccatggtgtatatgtgccacattttcttaatccagtctatcattgttggacatttgggttggttccaagtctttgctattgtgagtagtgctgcaataaacatacatgtgcatgtgtctttatagcagcatgatttatattcctttgggtatatacccagtaatgggatggctgggtcaaatggtatttctagttcaagaaaaccgaggcaataccattcaggacataggcatgggcaaggacttcatgtctaaaacaccaaaagcaatggccacaaaagccaaaattgacaaatgggatctaattaaactaaagagcttctgcgcagcaaaagaaactaccatcagagtgaacaggcaacctacagaatgggagaaaagttttgcaatttactcatctgacaaagggctagtattcagaatctacaaagaactccaacaaatttacaagaaaaaaacaagcaaccccatcaaaaagtgggcaaaggatatgaacagacacttctcaaaagaagacatttatgcatccgacagacacatgaaaaaatgctcatcatcactggccatcagagaaatgcaaatcaaaaccacaatgagatatcatctcacaccagttagaatggcgatcattaaaaagtcaagaaacaacaggtgctggagaggatgtggagaaataggaacacttttacactgttggtgggagtgtaaactagttcagccattgtggaagacagtgtggtgattcctcagagaaataattttaataatgtttgagtgaatcaaatatacaaatagtattgtgatgcagtgtacccacaatcattaactcaactatgaattactcaaagcactgtagataatagtctagcaaggatctgacaatatgttgagaagaaatgatgcacatgaaaccttgaaagtcaccttaaagaaactcatatcatgcaaatatgaatattttaatagctactataaaatagtagagctgagtgctgtggcacacacctgtagtccagctactcaggaggctgaggcagcaggatcacttgagcccaggagttggagattagcctgggcaatgtggcaagaccccatcttcaataaataaataaataacttagtagcaattggtgctatgaaactttttgatgtagcttggatatttgtcctcgcccaaatctcatgttgaattaatcctcagtgttggaggtggggcctggtgggaggtatttggatcatgggggcagatccctaatgacttggccctgtctttgcaatagtgagtgagttttcatgagatctggttgcttataagtgtgtggaacccccccacccactctcttcctcccgttcttgccacgtgagatgcctgctcctccttcacgttctctcataagtaaaagctccctgaggcctcccaaaaagcagatgctggtgttatgcttcctgtacagcctgcagagccatgagccaattaaacctcttttctttataaattactcagtctcaggcatttctttatggcattgcaagaacagcctaatacattttgcatggtgcatatcaactatggtaataaagtgaaaacaaagaagtgggaagctttgaaaagttgacaaattggttgagtaccatatggaactccagctgtaggatcagtcccattccaggcccaggcactcactggggccaaggtcagtagctcaaacattccacttccagtcagccctactcttggtgatctgcctctgaccccagctctagtaaatgggtttctgccttctcccatagggatttcactcctggctcattccccacttctggaaaatgagtttctttttttcttttctgtcttctgggactgaaatctagcttagctcttaacctcatgaccttttgccagaccacggagaactgaagtttccttggatcaacacacaccatctgctggttatagctccctcctcacagctgccgtgggtgccctccctgtgtgacttatttctgttgcttgtagctgagaacttcttctgttgatggtcctttatagtttaactaaaccgggattcagtctcactgggctagtcaaaccacttctaccagagcccagtttatgtgaatgatgaatgttttacatggaaaaaaaatgtttcttcatttactgaggaaggagcaccttcactgattttgtatgccaacacagacagcgaaggatcctgcttgtccttcacctatcagccatcacacctattaggaggggggaattggtcttttgttttgtttatttagtaaaaggaaatctaattatatattaaaagttaaaaaaattttagatcctgcctacatgactttaaaatgagcaataaaagtcattttttattcagggatagtaacaggaaaaagaagctagtatcagaatgttttaagattccgatacagtgcatatgcaggttttagtttacaaatagcagatggtgatgatttactataagaaggtgtaattaattgagaatgaaggatccttttggagtgtccattatgggctagtcattgtgctaggcgtaggaattagaatcctttccctgggtgggggtatacttaaaattattgcttttgtattctatggattaccttgaaataccctttgagtcatttctcaaaaattgtgcatatcataccgatctgataactcattgcactgttgatctgaggcttcatcccctcacctaaccacatggtcatccattttgcagtccacaagagcccttcctggattcatggaaagaacttgctctcacttgggcttgagaaagcataagtcaacttggcagggcatgtgttaacaagatgatttagaactttgcgaccagccagaaccataaagacagcttgtaataaaagtaaagctgttctcatgagatgcccatgatgagggcttctagggcaaggctgctgtttcttgctacctcagcaagaatgaggtctctttcccatgatcatttccctccccttcactgggcagggtgacaaagaccaggcctctgctcccaccagtcaacaacaggcagggctcccagcatgccgaaaccttgagagctacctcttcctcctttatcccttcttcagagggtagcctacctgtccacaccggcagagagtcactctgcatgtcagtcctctttcggttgcctcttttgtcaaaaacgtcacctactttcactgcctgggacacagctcagaacctgactcaaatatttgttgaatggccaacggaatgaatgaattgccctctctcctctaccttcaactggtagctcccccttcattcccagagcatcctatacgctttacctataactcatatcccacttgttattagttgttcaatgtctggtttttgtccactaaaatgtaagttttgactgtttctattttattcattattctatttctagcacccagcaatgtgtaagttaccaataaatattgattgaataaatatactctcaggttccttaccttgaagtcacaaaactattgatgcctatgcaaggtgacttgtaagcatacctaatacacaaatatagctgcctcaaggaaacgttttcagtctagctaggtcctgcttatgtcagatttctcagttcagtatttctgtatcaagcctcctaggtttagcccctttctatctgatccatcttctttgctagcaataaagtcaattacgctcttctcagttgtctaattcaccttgctaattctaccctcctaagctagaactaggttaatgaggaaacagtttccggatgtgtttctatttcccactatttttctgtttaagggaaaatttcaactaattttctacttgggtgtaagcatttccagctctctaggagcaaagtctctatcagtctggtttttcttttccaactgtggtttgttctgaattcctcccttctcaataatttatttcttctctcttttaacactctgtgttcttcttctcttgaacaccattatttagctaagtgttgctgttcttcaacaaccaccatcctctaaaactcctctgtccctgctcacttcattcataacacacaaattcaaattcctagccagctcacgcatacatgcataaactcacttatggaaggacattacaagagactccttacctctaggttaggaggagctttacttatcaactgaatacagtaggagctttacttgtcaactgaacactgagtaagtttgagaattgaaaatgagacctgagcatcacaaaacaacctttcatatctagatatagttaccatctaggagttcacgtgcattataaaagaaatggtcttgtttaagatgaaaccctgcaagctctgtgagggcagggattatgtctgtttatcacaccatggtatgttcagttcctaagagtgtcgggtatatagaggccgtcaatatttgttgaaattaaatgaaaagtttcagtcttttcatgcttcacaagaagaaaatcttttggagaaagccaatgatttaacataatcttctggatcttctatgacagaaaatagctatttaatccgtaaaaaatataaacatatggagccaaatactgccttgtgccaatcaaatgtttggtttattaatagttactaaatttattagtgctctctagaaaagagcctttttagaatttgatttcattttaggcagcattcgagaagcactgtcgactcagctttcctctggctgttgtctttttgtaccactccctaaccaaaattgatgcaaaggcaggatgctttgagttactctcagtaatcacatattattgaagtcagctggttattcttgacagacaatatgatccaaaataacacaatgtttaaacagaaggaacatgggtgtggacccccattgctccctcttcagagatgtctgccagggtccagggaacttgggatctacctgaagagtgttactaagggaacaatgtagccttttcatgaccttctatagctttagtttaaaaaaggaacattatcatcatttgctaacattacaatcaacagcagatctgataactcattttaagtgatatattgtatttaaattacagtataatccctaatagctttttgccagcagagtctttcaggattcaaaatgcaaattgcacctgaaaaagaaaaattatttttagacttatggcactttaacttaactgtaacacagttagaatactttttattattattattattaatagaatatgtttcggttgcgaattctggaggaatccctactggaaaataattgccagtcctcccttggctgtgagccattcattgaaatggactatgagataagactgaagaatttcactaatttcgggagtgccaactgaagtttattattgtgaatccattagacatgagatttctgtgattatctcaatgagttctaaaatccaggtccaaatgaggtggaaaaattttatatgactatatacatgttatagagcaattaatattttaattgggtgtcaagaaaagcagtggttgctctataacttaatttgggttcctctgcctctctgtagagtttctgaaaatttttaaatgtcatttggagttaaggcagaatgatactgtggaaaaagcatcagcttaaaattagacctaggctcagctttagttgaattccttaaatttacattggtgacgttgagtttgtaaccaccccatacctagattttcttaaaataggagtaatatgtcctactttataaagcagttctaaggaagaaaaatgattagaacccaaggcagtttcacatagtataagatcccagacgctggccaccaggtttcttgagttcaaacccactgcattatcctttgccaactatgtgaacttgggcacaaatcacttaccgtcaatttctatatttggaaaatggggacacaaatatagttaccatacaaggttaaaagaaaacaaacattaaagaaagcatttaaaaaacagccatcatgaagttggcacttggcgtttgacatatgtcaagtgttggcttctattgttattattattattacatttaagcgtctttggctaaacctaaatgaaaatcctataatttacattgtatatttaaatctgatagtgaatttatctgatagcaaatggattctaggttgattattcatatgcttgtgcctacgtgtgtgtatgcatatttgttgtatgtataagacctatggatttaagataaattagtcacatgtatatatgaaatatagttataaactaattactccccaaactagaacagcaaaaataggtctccttacttaagagtacagctgtacagagtaaattcactatgcttggaaacttctttcatatctatttgtgtaagtctgcagctagtttctgaacagttgtatagtgatggtttcatggtactcaccaattagacaagtataagtcatgaccttggctttcttggaacgtaaccagtggttgacagggagtgtttgagttaaatgataaactagcagtccagtttacactcagcatctggtatcccccactctccatctttcttcaaccaaggcatcacaaaagcaatttgggggcaggcattttcatttaaaaatggagagtggattgtggaagcatcctgagtgtttgtaatgaaagccatttggtttttattagcattagagtctacgtgcttgctagttttcagtcattttctcttcaaaaatggttccccagattccagttttcacattgctgccttttgaattgaatcctttgtgacccgttgtgattacattgcattttccttgtgttcttttaaaaagttctgactttctctgaattgtggttggggggatggtgggaggagggtggcagcaagggaatagggtcacttgtacttttagaatgttgtcaaaagagatttttaaattgtcaaaaattgcctagaagtaatatcaagcttagtgtctgctaataaagcaaggatttacaacagaaggttcggtcagaaatgggtgtcctaaggtctttacaaaagagcatttgctcctgggttccccaacatttctctgacctctgttggacaattctagaacagttataaatcaggctaattataatgatgttaggatactggtgttgtgtgtttggggttaggaagctgagagcttaggcaatttgaagacaacaagctgaaaacagctttgttcatataccattccctaaacattaattcagtgcagattaagaatagtcaatggagggaccgggcgtggtggctcatgcctataatcccagcactttgggagactgaggcgggtggatcacgaggtcaggagtttgagaccagcctggccaacatggtgaaaccccgtctctactaaaatacaaaaattagcctggcgtggcagtgggtgcctgtaatcccagctacttgggaggctgaggcaggagaattgcttgaacctgggaggtggaggttgcagtgagccgagatcgtgccattgcactccagcctaggcaacagaatgagactctgtctcaaaaaaaaaaaaaaaaaaggaatagtcaacggaggaattttgtcatggcactgggggtatatatgtggtatgtatgttgtaaatagatgcctaacctatttaaaacgtggctaatttatagtgaccaagagtttttaaaatagagtagtaattgagaaagaaatggtttgtatctttttcccacttaattttctttcctgttttgtacatttttctagatgcttcaaaaagacccaaagaaaagaggaatataagcacagtcattactcattatttgtggattctctgtttgctaattcacctactccctaaaatgtatttattacccccaaatcactatttgcagctctctcacagtcatttacagacatgcacagactggtgaaaaaactttgagtctttctacacacatgtactcagctgagattgaacaagggaactatagacaaggatcctttttgtagtccatttagtcaacgttttttgcatttttgtgctttttaatgatgatttcactgttaaaatgctccacaaccatagtgtggaagtgctatgtagtgttttgaagcacaagaaggctgtgatatgccttacagagaaaatatgagcaatggataaacatcgttcaggcatcagttatagtgctgttggtgtgagttaaatgttagtgcatcaacaaaatatattaaataaggtgtctttaaacagaaacacacataaaacaaggctatgtattaatcatctgtgtgtccagaagcccacaggaacctaaccttgtatttcccctagggtcaatgattcagtattcactaattcagtgtagtagggactttatatagaacaaaactcatataaataactagaataaaccacacttgttttttaattcctgtgaaataattcatatgggaaaccatcaaagacctgctaagtaatgatgaacattaaaaaaattaaactgggccgggtgtggtggctcttgcctgtaatcccagcactttgggaggccgaggcgggtggattacctgaggtcaggagttcgagatcagcctggccaacatggggaaaccccgtctctactgaaaacacaaaaattagccaagcatggtggcgggtgcctgtaatcccagctacttgggaggctgaggcaggagaatcgcttgaacccgggaggcagaggttgcagtgagcagatatcgcgccattgcactgcagcctgggggacaagagtgagacttcatctcaaaaaaaaaaaaaacaaattaaacccatataatagtactacagcacaaaactttatgctatctattttgttcatttgctgtttgtgactatcatatttatgtcaactttaccctgttttattgacaagtacccaggagcacttgaaaatgtagaaattcctttaaaccctcccccctccaccagaaaacaagcctccagggaatgcacatatataaatattaagatagttgttgtgtatagtgcccaaaatcctattttcagttagcaaactattggtaatgttggaaagcaaggcatccagataagaaaggggagatcttgtggcttggaggccattcaaaggcagacttaaggttgcgtcttcttaagggagacatgtagtgggggtcccgtgtaactggaatttcaccatgtctaatcgtgtctagcagaccaatggaatgctgtgcctcaagtttcttctgagaggcctatgagcctcatgagatatcaacaaaaatgtttcttggccatcagaagagagaagtgattttgaatatagtatagtttttgctattataatcactccaaaaccaggcctgttggtgcttgtggttcttgagagaggaggccatggggggtgaaattcaagagacctgtttacctataggcacaagagccctcctcaagacttgagacaatgaaagatgaggaagggaggtattttccctgcatcatccagcttcagcacccagcgggaactggatcatgggtggtgtctgggtaggaggctgtggaggctaaagtcagtggagcagagtggaagccttggggtcgtgggcttatgcatgagacacatgtgaggttccgtgcaacactttaccagccaattataagggactgaagtcactgcaaaacataggttgccatgatgtaagcccatttgcatttgcagactgaaaaggcaaaaggaaatattcctgattcaagtaagtatgggactatacttttttgatattggatctgttggtcctcatttctatgtttctcgattgtctaatgtggtggttccccctgactgcacattagacccactctagaaaaccttaaaaaaatgtctggaccccctccaaagattctgactgaattgatcaggagtagaattctgggcatccgtgtgtctaaaaggcttctcagatgattcacatgtttagccagggttgacaagtactgtcctaaaacatatttctgagatttttcacactccattttccaatgtgctccaaagatagcttaggcaggaaccctgctacatggccacttcaaaaagatgcacccctgcatgggcctttgagtgcatccacctagcgtggcctccatgccacttccctgtctggttactccactataaaaaattcatccgcggactctccaagtcctcaagctgtacattgtcctgcctttgtcccaacaagaattgttggtgataagtccgacagtggagaggctgtggctgcagagtggcaggaaagagagtaagtaaaggagaagacaggacaaaggaagagtaaaagggtacttgaaaaggactggaaaggagggccctgcaaggtgctgcttctcacgtgctccccaccagccttctgcattcaaagcagggagggaagagtgtgggctcagagccatacatgcttaagtgcaagccttggggccccataatttactagctgcttgatcttggaaaaattacttaatcttgtacagctaaaaagtggtggagctctgggattcagaactggtctgtctgggttaaaagagcccaaacgtttttcccagcgtatactacatctcccaatccatacacacacaatagacttttcagtgaggaatacagtaattaataacttcccagatggtagttgaacttgcttttaaattcctatagtcaaataagttgggagaatgttacaagaagattagttagaaagaaaatggtgtcatttattatcagctcgaaacattcagaattgtcatttgtaagaaataagctcattattaatagaagattacttctcttgtctttgtgtgaccattttcttaaattaaaaataacttttttcccttactgcaaaagtaatgcatgttcatctaatacaaattggaaaataaaggtaagcaaataatacaaaattaaacacactcttaatccctccgcccagatctaactgctgtaaatatgttagtatatatccttctagattttctgtgcttttatacagattttaaaaaatcatagtatatgctctttcactttacaatatctggtcaacaacattccatgtcaatacatttgcctttactacattattttttatatctgcttattaaggtgaacaatttagtctgattttaaaccacatttgtttactcagatgtcagagatccacagataaggaaacatctgaagagcccaggtgtggctatgtggagaggttgagtaattcaaaacaaagtacaaaacataaaaacaattacgaccagtttgacagttgtacgtctgtttcctacggccttctacccacaagtctaccgctgacttcaaagaaaagtcagcacagaggaggtccagaggataaggtgcaaaacgagaatcaaacccacgataagagattaaaggaaggttgatcaaagacccagcataaaagtgctagcccgtgacttgccttggcccatggccccaaaatattcatcagaacagagagcgctctttgaagtgattggatgcatccatgctcagacaagctcggtggtcaaagggaaattttaaagagtggccctggaaggagttagcaaagttgcctcttcctctctctgctctgcacatccctcacaaactgaatgttatttctttggtttgttgtgcagatgcaagtaatttaactgtactttttgccccctgggagatgtgggaagtacagttgcttttacaggatggagaatttgcactcatgatcagagaactgaaacttccagccatcctttttattcagagtgtttaaggaccggtggtatttccaaataggcagtagggcttgttcatgctctgcttgttcattctgcttgttcattaattgttcactacttttctgagtagagttcattgctctgtgatgtcgtgacagaagctttcatttccccagaaagaggaagaaaacagaagtgccccctccaaatggcatagccttcacaacattcagtttaaatgtttttaagtatcttaaaagagaagagttatatattgctaagtgtgttcttagaatgtctgtagttagcacttctttcaggctctagttttctggtttttcactttacataataatcctctatgtatttaggatctttatttttcacctttcccgttaccatatttttatttccttcaaaattcgagggaattgctttttctctctaccttttttagatcagtttcctagtctttaactgaggtgttaaagttggagtttttactggcaagtcttgactgagcacagtgttaggctctgtgagagagaatatgcattttctattttcacagagccacagtccaggtgaggagataatgaatttgcatgcgaaaaatgaatatgttgtgagctgatacagacttttgtcaggccagtctttcataaagaagtatttggaatgggctttgaaaatgcctgaaattccaaaatgaaataatatgaaataatatttattagtacgtataggggctgggtaacatgctcaaagttacagaggcagaaaaccataaggtgtctcacagaaactgaatatactcatttaactgtgacagatggctcatgcgagaaagtagcaaaggagaagcttcattcgttctattagtgttagaatgtgctatggaatctggattttattatgattgcaaaaggatggtattgaaaactttggagtggaaaatgacattctgaagtattttgagaatatgaatctgcctgtggagtacagaatggacataggtaagaagaggcctggggccacaactttgtcaaaagggcacaaatagagtctgagagaaagagggtttgagacagaatggaaacaatgggaaagatggaatggactctggaggcaatgaactgagaacggatctgacctctgtggcaaggggagaggaggtgagtgatgggctgtaagagaaggtggtaagaagactcatagatgattcagtcacacataaccataattgcacccctgttacctaggtgctaggtgatacaaagagattaatcacatcaacaaaatggttaggtagacagagtaggtatttacaatgaaaaactcaaagtagtctcacattgaagacagagtgaggcaatgagctctcaggagtcaagagaaatattccttgaagtttggagtcacagaagcatcagggaagagatggaacatgagctgaatgttgaatgatgggtagaatttggaaagaatgacaggggcaatcaaagctgtgggatgaggaggttaaagcaaagacacaggactaagaaaacacaaggagtgtttgtgacacattgacgagggccatctggttggaacagagtttgcataaaccaccaaaagaggaaaaggggaaggtagggtgatacgtttattctggtaaaggtttagacaccaagctaaagattttatttttatttctgagatagtctctctctgtcacccaggctggagtgcagtggcgctgtcttggttcactgcaacctccacctcccgagttcaagctattctcctgctttagcctcctgagtagctgggactacaggtgcctgccaccatgggcagctaatttttgtatttttagtagagttggtgtttcatcatgttggccaggctggtattggactcccaaagtgctggaattacaggcgtgagccactgtgccctgccaagcttttataatttaacctgggaaatgtcaagccactgacatttttcagcaaggttgtggccagtgtcaaagagtctttcgggaagtttggtttgtggaagatgtgtagaatatatcaagatgaagaactgggtgacttctagtcaaaaaggaatgatgatataaaccaggtaccaatcagaatgagaggtatggaagaggggcaaaggaattaccagtaaaccaaggggaaatagaaatacagttttacccaaagtttcaaatccaggaggctatgatagcaactgtgctgtatactaaggcatacaactcatgagatgactggtttggtaacagtcctgagcgttttgttttaaagagctgggtcctgaggttccagacaagcaaacatgccaaaaaagtggttcaatgggggggcttgaggctcagctggaaaccatgtttaccataccaagtttaaaaaatccacacagctcagcaattgtttgaagtttttaattaattaattaattcataaagtgaagtattttcaaaagctcatctgagagcttatattctcttgatacagatgaattctcaattgctcttttgttttcattgcaaaacagttcaacttgtatgagactcaaagtggggagggcaggagcagaattttctctgttccgggtatagacattatgggtattgggccatattctcctcttcgttggtaataattcctattttatacatctttctatcaattgcagctcctaccagagtcaacgtcttgattgtaaatactcagtgttggttgatttgcattttcatcatagtcctgaaagataaaagtggacctaagaaaaactaataagcttacagccagttttataatgacagactctatataaacaaatgcaaattggatgtcaaatttgaattacaaaatttatttgagcaaggtccaggaagtaataacagtgtcttcagatcttttctaaaatgataaaaattcattaacaatcttccatggcttggagtctcagagactttcaaaagtcacagcactttgaagagcagagttggcaactaaagttatcagagtgaagaatggcatgctaacctcaggtgcaggatggccaactcaaagtagacctctattctttgttcttctgagataggaactagccagaaacttagttattcaggggtggggtgggaaggctgtgggacccagggtggaaggacccacacagttcaaaataaaacgaaccaactatagtgaaggaaaagagaactatacacagatagtattcctcatccccctgaattgacttatataaaaaagaaaacggagcatccgacaaattgatgcaatcaaaagggagcaataagcctttttctccttttaagcctcttaagaaataaacccatcattttatctagtgttttctctgctcttgcagctgctcgactgatccaaaacatggatgccaccactgagccttgtacagactttttcaaatatgcttgcggaggctggttgaaacgtaatgtcattcccgagaccagctcccgttacggcaactttgacattttaagagatgaactagaagtcgttttgaaaggttagtagagattgtgtctgtgcatcaaagatttctctcttaatatgttcattttttaaatatacaattgttagccattacaaggaatgtcacagaagattaaaaagttaataatccttccaggatttgtgtaccaccaccaagtcactctgatagtggcagacactgaaattaatgtgttgacatctcttagcattcctgctttcatttgtaggtatgcaaataataaagcggtatcatctctagagatggcaggtttggttttttgtttgtttgtttgtttgttttttgagatggagttttgctcttgtcacccaggctggagtgcaatggtgctatctcggctcactgcaacttctgcctcccagatttaagcaattctcctgcctcagcctcccaagtagctgggattgtaggcacctgccattacacccagctaatttttgtatttttagtagggacggggtttcaccatgttggccaagctggtcttgaactgacctcaggtgatccaccagccttggcctcccaaagtgctgggattacaggtgtgagccactatgcccagccaagatggtagttttatgccattttacagaagaaaaaaaattaaatgattggcacagaaacctacttctgtagtctccctacccaaaccctgtgttaaagttactgtaagatgttactaagatttgccttcccagcacaggtatattctaacctggctaagactgtctccctgagaagttaagaaatctagccaagtccctcctatcctttgttctctgttctcccctcttctagaagttattttgtagaagaacaatttttgctactttttaacattgaaacaagtaggacaattcaattcattcatttggagcatgaacggtacagtcacacaaagataattattttccagccatcaaaaagactattcatactaaattccaaattcctctgtgttattgtttttttttaatctcaatttcaagaaaagtaactgttacctatggcagagccgtatgcatcactgttcataaaaaaaaaaaaaagataatctagtcaaaaggactttcatctaaattggctgattaaactgactcccagttctgtgctaggaatgataatctggtaaggggtttggtttttcctataatgttttggaactggggggaggaaatgaatgtacctccagaaaagcaaggtttttttttaactgaacccactttgcaaatgttaattactgcaaatgagcaattatgtttgcatagtgcaaatgagcaattatgttgatgcattttattaaatgtcctatttcagatgtccttcaagaacccaaaactgaagatatagtagcagtgcagaaagcaaaagcattgtacaggtcttgtataaatgaatgtaagtgctcttcatttgatttcattaggagtatatatatatatatattggtgccaaactatgcctagatttctaattgaatttatgtttgttgtttccaaaagctgctattgatagcagaggtggagaacctctactcaaactgttaccagacatatatgggtggccagtagcaacagaaaactgggagcaaaaatatggtaaggcaattttcctactaaaaaagaaatttccatgtaaaatctatgttataatatcattagtgaactaaagcttctaaagatatattttatcttttattgctttaggtgcttcttggacagctgaaaaagctattgcacaactgaattctaaatatgggaaaaaagtccttattaatttgtttgttggcactgatgataagaattctgtgaatcatgtaattcatgtaagtttgtgtgtcaaataactaaagttacctttaaattgtaataaaacttccacatacattgttgttattgatatttagaaataatgctattttcaattgaattgaataagcaaggaggtagtatatccatgctctgtccctaatacctggagttccaattttgaaagtattttcttaatgctgttttcgacattcaccccttgcttctgctacctctgttttagatacctctcccttcacaaaacaaatgataagaagggctccaggcccctcctattcagaaaaagttcctaatttctttgtatagtacttgaaaggagcatgctttcgtttatagaagtaatgcaggtctagaaaccaaaaaataataattgctttcaaaaagaacacagaaaagggattttaaacatcatttttttcctcactaaagagtatctgtacttttttctcaactaaaggtaaataaaatgcctttcttttaaaatggatttattgtatttttacaaatgtaaacaatttgatttaggtgtcacctaagactagattaatgactatgtttggaatgtactgaaaaatataaagagtttttctttcttcctttttttttttgtttttttttttttttggtttcctgtgtaagaaattatacaaaaaattgcaggctactgaatcacctaatcatatctgtgtcactattgcataaatctttatggtcgtttttgttaaaatcatgaaaggaattgaacccaaatctcctgcagtgggctctctctcttctgaaactttctccttgcaggatcaccttgaggaccagggggtggggaaggatcagggcccttcatgtggagatatcttctggctctttccataccagttctttgggttatgttttcttttctattggcctaggctctccacagctgctaggattctctctttaacccagaaatgctctgtttggcctccacactcatgttgccatgcagtgagtaggaaacaatcttgcaaagctgcagtatgcccagatagctcccacttgggtattaaacatggaccagacacgttagcgcaaaactgagtttcctctttcacacccttaactgctatctgggtctactgaggttcttctgagcagagcagctttgaggagaaccaaggagaagtcgcctccattcccttagggtagagaatcttaaaaaacattttctggcacaagttacattagctaaaagattctggagttaccttagaggttttccacttctccccttctccccatccatccaaatcaacttgaagaatattaacccactcccaccaatgaaaggggatcccaactaagggtggaagcagatgagaatgttcccaggggagcacattagaatctcaggaagctgagaaatctgtgaatatgtaatttagaaatttccacgtcctagaatctaacatgtttttgttcacttgcaccttctgctctgcattaaaaatccctcctagtaaatcttttgttcactttcttttgttttccttaaatatctgcagcacagtcctccagattatctaactgcccgttagtataacacttacaagtagtgtagaaagcatttcctaactaggtatttattgagtgtctgatggtcaccccataaacagcaagagtaggatctttcacatacatagatagacatgcttgtatttttcaaacttttctatattcactgaatgatttattttcttttatgtatattttttatagattgaccaacctcgacttggcctcccttctagagattactatgaatgcactggaatctataaagaggtaaaaagaaaaaaaataatcaaaaccaaactacaaaatgatctggtgtaaacctacaagtaatgaaaaagataaagccaaattaaatttagccctctgatgtttttcattcatgacagggacttaaaatcacacataatagtgagctgtctttgatagaatgaacattctcaatagaatgaatgaaggtattttacaaaactaggaaacttgaaattccttatttgtatcttggtttttagtatttaaaacatatgatcgattttgaaaagttaatttaaaatattttaatccacctgtaaactgcattatttaaaaaatgaaaagatttatcatggtctagggtggtgctggtgaggaccagagggtcagtgagagatacactctgcagcatccttctggaaccatctgatttgactgtcagagaactatgcaggtagtgacattgggctcagacaaacttttgcagctaccttgtgactctaacattggccaggtagccagtgggcatcatatcccatagtggacgtttggatgttctggagtgctttcttattgtctcacaaccttgcctcccttgggctgatgttcacgtgctctttttttttttttttttttattatactttaagttttagggtacatgtgcacattgtgcaggttagttacatatgtatacatgtgccatgctggtgcgctgcacccactaactcgtcatctagcattaggtatatctcccaatgctatccctcccccctccccccaccccaccacagtccccagagtgtgatattccccttcctgtgtccatgtgatctcattgttcaattcccacctatgagtgagaatatgcggtgtttggttttttgttcttgcgatagtttactgagaatgatttccaatttcatccatgtccctacaaaggacatgaactcatcattttttatggctgcatagtattccatggtgtatatgtgccacattttcttaatccagtctatcattgttggacatttgggttggttccaagtctttgctattgtgaataatgccgcaataaacatacatgtgcatgtgtctttatagcagcatgatttatagtcatttgggtatatacccagtaatgggatggctgggtcaaatggtatttctagttctagatccctgaggaatcgccacactgacttccacaatggatgaactagtttacagtcccaccaacagtgtaaaagtgttcctatttctccacatcctctccagcacctgttgtttcctgactttttaatgattgccattctaactggtgtgagatggtatctcattgtggttttgatttgcatttctctgatggccagtgatgatgagcattttttcatgtgttttttggctgcataaatgtcttcttttgagaagtgtctgttcatgtccttcgcccactttttgatggggttgtttgtttttttcttgtaaatttgtttaagttcattgtagattctggatattagccctttgtcagatgagtaggttgcgaaaattttctcccattttgtaagttgcctgttcactctgatggtagtttcttttgctgtgcagaagctctttagtttaattagatcccatttgtcaattttggcttttgttgccattgcttttggtgttttggacatgaagtccttgcccatgcctatgtcctgaatggtcatgcctaggttttcttctagggtttttatggttttaggtctaacgtttaaatctttaatccatcttgaattgatttttgtataaggtgtaaagaagggatccagtttcagcttcctacatatggctagccagttttcccagcaccatttattaaatagggaatcctttccccattgcttgtttttctcaggtttgtcaaagatcagatagttgtaggtatgcggcattatttctgagggctctgttctgttccattgatctatatctctgttttggtaccagtaccatgctgttttggttactgtagccttgtagtatagtttgaagtcaggtagtgtgatgcctccagctttgttcttttggcttaggattgacttggcaatgcgggctcttttttggttccatatgaactttaaagtagttttttccaattctgtgaagaaagtcattggtagcttgatggggatggcattgaatctgtaaattaccttgggcagtatggccattttcacgatattgattcttcctacccatgagcatgaaatgttcttccatttgtttgtatcctcttttatttccttgagcagtggtttgtagttctccttgaagaggtccttcacatcccttgtaagttggattcctaggtattttattctctttgaagcaattgtgaatgggagttcactcatgatttggctctctgtttgtctgttattggtgtataagaatgcttgtgatttttgtacattgattttgtatcctgagactttgctgaagttgcttatcagcttaaggagattttgggctgagacaatggggttttctagatatacaatcatgtcttctgcaaacagggacaatttgacttcctcttttcctaattggataccctttatttccttctcttgcctaattgccctggccagaacttccaacactatgttgaataggagtggtgagagaggacatccctgtcttgtgccagttttcaaagggaatgcttccagtttttgcccattcagtatgatattggctgtgggtttgtcatagatagctcttattattttgaaatacgtcccatcaatacctaatttcttgagagtttttagcatgaagggttgttgaattttgtcaaaggccttttctgcatctattgagataatcatgtggtttttgtctttggctctgtttatatgctggattacatttattgatttgcgtatattgaaccagccttgcatcccagggatgaagcccacttgatcatggtggataagctttttgatgtgctgctggattcggtttgccagtattttattgaggatttttgcatcaatgttcatcaaggatattggtctaaaattctcttttttggttgtgtctctgcccagctttggtatcagaatgatgctggcctcataaaatgagttagggaggattccctctttttctattgattggaatagtttcagaaggaatggtaccagttcttccttgtacctctggtagaattcggctgtgaatccatctggtcctggactctttttggttggtaaactattgattattgccacaatttcagctcctgttattggtctattcagagattcaacttcttcctggtttagtcttgggagagtgtatgtgtcgaggaatttatccatttcttctagattttctagtttatttgcgtagaggtgtttatagtattctctgatggtagtttgtatttctgtaggatcggtggtgatatcccctttatcattttttattgtgtctatttgattcttctctctttttttctttattagtcttactagcggtctatcaattttgttgatcctttcaaaaaaccagctcctggattcattaattttttgaagggttttttgtgtctctatttccttcagttctgctctgattttagttatttcttgccttctgctagcttttgaatgtgtttgctcttgcttttctagttcttttaattgtgatgttagggtgtcaattttggatctttcctgctttctcttgtgggcatttagtgctataaatttccctctacacactgctttgaatgcatcccagagattctggtatgttgtgtctttgttctcgttggtttcaaagaacatctttatttctgccttcatttcgttatgtacccagtagtcattcaggagcaggttgttcagtttccatgtagttgagcggctttgagtgagattcttaatcctgagttctagtttgattgcactgtggtctgagagatagttttttataatttctgttcttttacatttgctgaggagagctttacttccaactatgtggtcaattttggaataggtgtggtgtggtgctgaaaaaaatgtatattctgttgatttggggtggagagttctgtagatgtctattaggtccgcttggtgcagagctgagttcaattcctgggtatccttgttgactttctgtctcgttgatgtgtctaatgttgacagtggggtgttaaagtctcccattattaatgcgtgggagtctaagtctctttgtaggtcactcaggacttgctttatgaatctgggtgctcctgtattgggtgcatatatatttaggatagttagctcttcttgttgaattgatccctttaccattatgtaatggccttctttgtctcttttgatctttgttggtttaaagtctgttttatcagagactaggattgcaacccctgcctttttttgttttccatttgcttggtagatcttcctccatccttttattttgagcctatgtgtgtctctgcatgtgagatgggtttcctgaatacagcacactgatgggtcttgactgtttatccaatttgccagtctgtgtcttttaattggagcatttagtccatttacatttaaagttaatattgttatgtgtgaatttgatcctgtcattatgatgttagctggtgattttgctcgttagttgatgcagtttcttcctagtctcgatggtctttacattttggcatgattttgcagcggctggtaccggttgttcctttccatgtttagcacttccttcaggagctcttttagggcaggcctggtggtgacaaaatctctcagcatttgcttgtctgtaaagtattttatttctccttcacttatgaagcttagtttggctggatatgaaattctgggttgaaaattcttttctttaagaatgttgaatactggcccccactctcttctggcttgtagggtttctgccgagagatccgttgttagtctgatgggcttccctttgagggtaacccgacctttctctctagctgcccttaacattttttccttcatttcaactttggtgaatctgacaattatgtgtcttggagttgctcttctcgaggagtatctttgtggcgttctctgtatttcctgaatctgaacgttggcctgccttgctagattggggaagttctcctggataatatcctgcagagtgttttccaacttggttccattctccccatcactttcaggtataccaatcagacgtagatttggtgttttcacatagtcccatatttcttggaggctttgctcatttctttttattcgtttttctctaaacttcccttctcgcttcatttcattcatttcatcttccattgctgataccctttcttccagttgatcgcatcagctcctgaggcttctgcattcttcacgtagttctcaagccttggttttcagctccatcagctcctttaagcacttctctgtattggttattctagttatacattcttctaaatttttttgaaagttttcaacttctttgcctttggtttgaatgtcctcctgtagctcagagtaatttgatcgtctgaagccttcttctctcagctcgtcaaagtcattctccatccagctttgttccgttgctggtgaggaactgcgttcctttggaggaggagagacgctctgcgttttagagtttccagtttttctgttctgttttttccccatctttgtgcttttatctacttttggtctttgatgatgatgatgtacagatgggtttttggtgtggatgtcctttctgtttgttagttttccttctaacagacaggaccctcagctgcaggtctgttggaataccctgccgtgtgaggtgtcagtgtgcccctgctggggggtgcctcccagttaggctgctcgggggtcaggggtcagggacccacttgaggaggcagtctgccggttctcagatctccagctgtgtgctgggagaaccactgctctcttcaaagctgtcagacagggacatttaagtctgcagaggttactgctgtctttttgtttgtctgtgccctgcccccagaggtggagcctatagtggcaggcaggcctccttgagctgtggtggactccacccagttcgagcttccgggctgctttgtttacctaagcaagcctgggcaatggcaggcgcccctcccccagcctcgctgccgccttgcagtttgatctcagactgctgtgctagcaatcagcgagattccgtgggcgtaggaccctccgagccaggtgtgggatatagtctcgtggtgcgccgtttttaagccggtctgaaaagcgcaatattcgggtgggagtgacccgattttccaggtgcgtccgtcacccctttctttgacttggaaagggaactccctgaccccttgcgcttcccaggtgaggcaatgcctcgccctgcttcggctcacgcacggtgcgtgcacccactggcctgcgcccactgtctgggactccctagtgagatgaacccggtacctcagatggaaatgcggaaatcacccatcttctgcgttgctcacgctgggagctgtagactggagctgttcctattcggccaacttggctcctcctccttttttttttttttttttttttttttttgagacagagtcttgctctgtcctgtcacccaggctagagtgcagtggcgcaatcttgggtcactgcaacctccgcctccctggttcaagcaattctcccagcctcggcctcctgagtacctgggattacaggtgcccgccaccgcgcccagctaatttttgtatttttagtagagacggggtttcaccattttggccagtgtggtctcgaactcctgactttgtggtccacctgcctcggccccctaaagtgctgggattacagatgtgagccaccacacctggcccatgtgcttttcttacagaaagtaaggaacagcaggagacaaaactaataatcttacacgttattagatattggggaaaggtgttggttctacaaaggtttgtcttataattattttgtagctcaaaagtaagttatctttgatgatcctaatggctcacagtgtagtgatgtgactaaaattacattttagttaaaattactagctaaatatgtttatgattggcatttattttgccaaattatgaagttcgaataacatggaatgaattcactgtaaggtatctttttgaatgactacacaacactgaaatgaagaaaaagatatatcatcaaaggccacaattaatagcacagataaatacatgggtatgggatatttgagttcagtacaatctagttgctgtgtggggtacagctactggctttaagagcaatgcagctgctttctgttacagatttgaaagtgattgaggaattttggttcactattgtacatttttatcaccatgaactgggatgcttttcatatttaggattgtgttcttatatcaaatttttcaaatcctatgatacatattttttttacattttaattctgatatcaaggtatacctggcagtcgatgtatatatttaaggcagtaaaagctttttttttttcattgttaagatgttgcatttttgcattttatactcaatgctatcccataatctcaaacaggtcacaaactggcagtctttggcttgaatctgatatagaagcatttttgtttaacctgtagtgtttttttttaaattttgaattagttgtcaatatttttcaaaattgaaagatttcatttgagaatccagatttcttagtaagtcagtagaatttgagcccctagcttgcattcttatatggcagcaattgaccagagtggtgttgtggttgctccttttagaaagggcatttattggctgggcgcagtggctcatgcctgtaatctctgcactttgggaggccaaggcgggtggatcacctgaggtcgggagatcgagaccagcctgaccaccatggagaaaccccatctctactaaaaatacaaaattagccgggcgtggttctgcatgcctgtaatcccagctacttgggaacttgggaggctgaggcaggagaatcgcttgaacccaggagataaaggttgcagtgagccaagatcgtgccattggactccagcctgggcaacaagagcgaaactccatctcaaaaaaaaaaaaaaaaaagaaagggcatttgttctccaggtttgaacagttttgaacagtcctcatcaacatgattcatcgatttatattgacttatcggctcctgtaggcacttgattttgcatattagtctggtcttggctaagccacagcagtaaaaacacaaatacagtagctcaaacaagaaaaagtttacttctgtctgtcatgccagtctggaagtaggcaggccatccagatgaggcaggaagctctgctccatgggaatgtctgggagccggctttctttgattttttgctctaacatcaacctcctctggtgtttttcttagtctatttggtcaaagttggttcaccagtgccctattcacatgtcaggccacaggaagaagaaaagagagaaagtggtagacaaatagttaacctttatgtaaatggcgcagaacttgcatacattccgttgcttaaaacattgtcatgtggccacaactaaatataaaggaggcaggaaaatgtagtcttgagcagtggccatgtctgtgtcttgttaaaacttggttggcagagaggaaggtcgtatcatttaaaagatgaggagtacatataccaatgtcatttagcatactctgccacagtttacatccactgatctagggaatactgtatttgtgatcaaataacacagtggtgatcaaatctagaatcagtaatatgtttatagagtttatgagtgagaaatctgagtctcagaagtttgctgtcaacactcagcagaacagtagtatagtggcaaactttggtccttctctcttcttcattctactacattattacaatttcttaagagttggtacttcatactagtagagttctttgaatgagcaaatgatagaagaaactaacctgcactggcacttacagcccggaagttattctcagcttaattaggtgctcttcaacgatctgaatcagactagcaaacacgcagcatgcttgctgccttgctcctcttccataactatgtacttttggtgacatccttctttcctgctaacctgagatctcagaattcttcttaaggtagtgcttcaagctgtaagcaatctcctttcagtggaagggagttgcataaaaataaaagttacatgtcatcccagaaatgggtaattatctgaatatttctgcaccctctccctttttttaaatccattcttttgggcatgggggtgagagcgtgtgtagttacagtaagaattccaatgttacccttatttttcccatgatattttctactctctcctaatccctaccacctgcaatccctcagtttcccctgcatttctggcaaaattctagtttttccactactctgctatctttgaaagatgtcaaccaccttaagtatttctgtcttgtgtcttattgcttcatgaacaaaaaatggtgcgaagtgtagaataacaagtttaccttcagtagaggagttataaatctggaaggaatgttaatgtcagtgtatcattggccttcaatgattttctcccttataggcttttatatatgcttttccctttgcctagaacttgccccccacacacaccacctgcctacactctttcctctaatatagttttcctagcacccaggtttctgtatacttcttatttaatgtctttttttttctataaaactgtaaatgaagtggaagcaatgctgtgtctcattgccctttgctctttttctaatacctaccaaagtttctggcccttaaatactacagaatcagcaaatgaatgattgagggggaagatagcagggaagagaggaaacaaaagaaagaagaacccaatcttttggaagccctccttgtttccttcccttgattccgggaaacatgagctctagggcatcaatagctaatagcatacatttctttagcattttacaaactctgtgttctcttttctcttttcaatccccagttacttctttgctaaactcagtttgcctgaggtatatttatacaatcaatgggtatcatacatttgcagtttacattattttattggaaataatcaagagaagttttgagaattggcatagggtcaccaactttttttgtcaaagaaagatggtcttagaccagagaggtctggcttccttgcccgtcgctttagcctataattttaaaactttagtgtggggtctaccttctgcagatatgcctcagaggctgaggatcacagagggtcacattccctcttcagtcaaaagtactctaatcgtaggtctcctttatcagattattaactcagcctgtttccccaggtcttctttgatccttccttccaggatatccaggtcatccagaggtatcatctcccataatcttaaaaccaaacttcttatcgactatgaaaatagcccccacaattactaagaagatcatttcactttatagaagtcattttttttttgctttggataccctcataatggaatttttgtattgtaatatttgattattattataatctagaaagggaaagtgatagagaacagttgcatcatctcagaaaggggcccacattcaccgtgtctgctcttcctaacaaactgttctcaagatgttctcatcaaggagcttcttgtgctatatctttgttaaagagatggagcctgagttctgaggtattctgattatctgaagagattacttaatgacacaatgctatctcaaagaacagaagtagggagattcaagacaattctattccttacagaggtacaaatttctatgctaggaaaacaatacgaaagatacacatggcccataaacataaccattcccattcacaaaatttgtaagtgaaaccaaccagcaacctcatgtgagaatgttcttctatattgattcactgagagaaatgaggaccttaattttcttaagaaatcacccaccttcagaagagtctgaactctgtattgggggtgaattggaattggtctcaaagcttccctttctctaccttcttagcttttcaagagcaattgttatcttactttgttgtccttcataaggaaatctgaagattaggaatccaaaatatttgagcataattacataatagatatgtttatgctctgtactgatgtttgcctgagaaggagcaataagtgaggttagtggtttccaactctaaggactactttgtgtgtgccaattacagggctctgtgcagaaacacctcacatgtacacacacttcaaaagccactatgatttatttttacttgtgcatttatacatccacaaaacatttctttgagtagagcatttcaggtctaaaagaaaagtaagaaaaccactcaggctagagtttgagagcataaggaggcgggaaaggaactggagagtagaagctacagggtatactgctgcagggcatggctagggagaagaagccagagttataaagaagtgtagagccttcacaaaatctgaggttcataaaaatagagacattttagggatgaggatagaggacttggaacatgggcacaatggactgaagccagaaagcgatgacccagagtctgtgctcctagatcagaaaagccaggagaagtctccaaattatatgtacctgggaaagaacacaagctgagattggctatcctgtagatgagcaggtgcaagctggaactgggattaaacaagaggggattttctttgtccacctacccaatgtacaagctgagagaaactgttcaggacttgagctaagaatagaagttccgaggaaataggaagtgagagaaacttaatatatttacaatttaacttcatttttttttaattcaacagatcttcattgagcttatgctatgtgacagatacttttctaggcagtagacattccaaggaaacaaggtccttgttctcatggaactcatgttctaatgggaagagatagacaataaataaccaagtaaataatttaaggaaatgagacaaattgtgagtgttataaagaaaataaatcaaggtgatagaataataagtgactggggtaaggcatgggtgattcaatttggcttgctgaaaccatctctggctgttgtttgtagaatgtgttttaatggaagcagaaagatcagagaaggccacatggtaattcatgtgaaagataacgatggactcagatggcagcaagtcagatagagaaatctgagcagacctaagataatcttgtgtaggtggctctatcattatagggaaacagtttgtgtactttaaactgctcggccaatatgtgcctcagtgatacgtggcggagcttgtctcactgcataacacagctatgacatgataagacaggccctgcaagggaaactgctgacctcactttgtcctttctgggtaccaagtgactaatagtcagaaggtttcactcagttcagtaatctgtgtttaagaaaacaaaagggggcttttaaacatgagatttagtgaatatgacagagaatttttgagatcaactgaactcagtttgtaaaaagagctagattcagccccccaagcatggaataaaccttggaagttatgcaagaagttgtacaaatcttcaggttcttattgataacctgatgaaagccccaaacagtccctatgctggtccaagtttgggtcctcttaggtcccacgttcctcctgctctagcgtcctgctccactgggggctattttttatttccagtgcccagaaatggctgtgtgactatatgtttgcagtctgttggagggaagcaggtctctctgctaacaactgcacactagctgacatgctgcttaaattgagaaatgtttctaagcttttttggtaggaaataatctttcctgcttagtctccctctgtgttcccccagcaaacttcttgtgtagcattattaaatattccccaacatcagtggccaagaatgacacaattctgtgactcctcagtcacttcatgctccacattaagtggagtttcttcctagaatggggaaggcagaacattggtaagagctaggtgtctcagaatctttggaaataaaatccctgatccataggtagttggctcgctaggttacccagatatcaatctgacaggacagttttctgttcctccctgggtcttgattgtcattcattaggaatgaaattaaagtttgaaggacagtagtcaaatggcattcatttgctctcttcctctttggcaaatctaacaaacatcaggctttttccaggcaggaagagcctcatttctaaagagccaatttataaatatcattacctgattctgcaaaatgaagatagtcctaactagagtaactatccatggtgttgggtgttagtaaatatcatctcattggtagtgtgtgattttaaaacccacaaaactgctattatatggattttatctaactgtttaaaaccgatgatcacctttgaaactactgttacgagtactaggacttacaattttttttttaagaaaagctacataaatgttttggtggattcttcttcacgtaaacaatcattgatttgctatctcagagcttcaagaaatctaccttatgactgtcaaaaatgagagctgactctggcctctgttgtaataactaattgctctctcagtcacacacacacaaaattaaatttgggtttaaaaagtatcctggccaatctactttttaagtgttaaaatacatgttgatttgcctgacgtggtggctcatgcttgtattcccagcactttgggactcagaggtggtggatcacctggggtcaggagttcaagaccagcctgaccaacgtagtgaaaccccgtctctactaaatacaaaaaattagccgggcatggtggcacatgcctataatcccagctaaggcaggagaatcacttgaacccaggacgcggaggttgcagtgagccgagattgcaccattgcactccaccctgggcaacaagagcaaaccccgtctaaaaaaaaaaaaaaaaaaaaaaaatatatatatatatatatgtataaagtttcttcccaaatcatgacaattatcatcatttcacattttccatatctggaagtatcataataaagaaaattaaaaccttaaggtagaatcacatctcgtacaatggatttagcacggcagtaaccttaagttctgacaccagataaatttggaagtcaggaaagatagtcatgatactaagacatatgttttaatcagttacattggagtagttaccaggtaatggaattcattaaaagaagtggtatattccatgtagctatattaaatactcgagcatcccagaagctagtgatactatatgcttccagttttctgagaaacttgaccagtttagcagactagaagcatcatccaaagttcttgtgcttgccttatatcaaagttctatagtctttaaatacatcggtaaggataaagagactggagcagaatcagtttgctgagtcaacaaagtgcccaagatgattactgttattgttttctcacctcatcaacaaaaagcatcccatatatatatatgtatatacaccatatatatgtatatatacacaccatatatatacacacaccatatatatatatatatatatatataccatacatatatagtgtgtgtatatatatggtgtgtatatatacatatatatggtgtatatatatatgtgtatatatatggtgtgtatatatatatggtatatatatattttccaatatcaattttccaatatcaatctactgagatatatctcagtagattgatattggaaaattcgaactaccattttgtttatagtcagtagtaataccctgctaaaggtcgattgatttatatgctttgggaatacagttaattcaaaacactgcatgcttgtactttggaatagttggtcccatgaggtatgaactcagacatactcgtttacttcaaagtgaaacaaaaattctgattaccttaaatagaaaaaaattgagttgctgagaatatacgtaaaattgtcttttcatttctgttactttagtgattagagttttttaaaaatataatttcaagttttattttagattcagggggtacatgtgtagttttgttacatggatatattgcatggtactgaggtttagaatatgaatgaccccatcactgaggtagtgagcatagtacccaatagttagtgtttcaacccttgctccactctctccctccaccctctattaatcctcagcatctattattgccatctctatgtccttaaatgcccaacatttagctcctacttataaatgagaacatgtggtatttggttttctcttcctgcattaattcacttaggataatgacctccagctgcatccatgttgctgcaaaggacatgatttcattcttttttatggctgcatagtattccagggtgtatatgtaccacattttctttatccagtctaccattgatgattctctaggttgattctacgtttttgctattgtgagtagtgctgtgattaacaaatgagtgcataagtctttggtagaatgacttattttcttttgggtatatatccaataatgagatttctgggtcaaatggtagttctattttaagttctttgagaaatctccaaactgctttctgtagaggctaaactagtttgcattttcaccacagtgtataagtgttcccttttctctgtagcctcaccagcatctgttcatttttgacttttgataatagccattccaactggtgtgagatggtatttcatcgtggtttagatttatatatctctgatgattagctatgtttaatgttgtctcgtacatttgttgaccacttgtatgttttcttttgagaagtgtctgttcctgtcttttcctactttttaatggggctatttgttttttgcttgttgaattgtttaagtttcttgtagattctggatattagacttttcttggatgcctagtttgggaatgttttctcccattctgtaggttgtctgtttactatgttcatagtttcttttgctgtggcagaagctatttaatttaattaggtcccacttgtcaatatttgtttttgttgcaattccttttgaggacttagtgataaactctttcccaaggctggcatccagaaaggtatttcctattttgttctaggacacttagagtttgaagtcttacatttaaatctttaatccatcttgaggtaatttttgtgtatgatgaaagttaggggtcccattttattcttctgcatatgactagccagttaccctagcaccatttttgaatagggagtcctttccctgttgcttatttttgtcaactttgtcacagatcagatggctgtaggtgtgctgctttacttctgtgttctctatcctgttccattggtctgtgtgtctatttgtgtacccagaccatgctgttttgactactgcagcattatagtataatttgaagtcaggtaatgtgatgcctccagtcttgttcttgttgcttaggattactttggccatttgggctcttttttggttttatatgaattttagaattgttttttctaattctgtgaaaaatgacattggtagtttgataaaaagagtgttgaatctgtatattactttgggcagtatggccatttgatgatactgattcttccagtccataagcatgaaatatttttgtttgtttgcttcctctatgatttctttcagcaatgttttgtagttctccttgtagaaatatttcatctccttagtcagatatactcttagatatttatgtaatgtgtatgtgtgtgtgcctattgcaaatgagattgtgttcttgatttggctctcagcttgaacattattggtaaatagatatgccaccaatttttattcatggattttgtatcctgaaatttttgtgaagttgtttatgagttccaggagccctttggcagagtcttcaggattttctaggtatagaatcatatcattagtgaaaagagagagtttgacttcttttcctatttggatgccttctctttcgttcttttgcctgattgattgatctaggtaggacttccagtactgtgctgaataggagtggggagaatggacgtctttgtcgtgtttctgttctcaaggggaatgcttccacattttgcctatccagtatgatgttggctgtgggtttgttatggatagttcttattattttgaggtatgtttctgcaatgcctagtttactaagggtttttattatgaaaggacattgggttttattgagacttttcccacatctattgagatagcccaatggtatttgtttttaattctgttgatgtggtgaaattgattaggatcttaatgcagattcacagatgaaaaattgttctattgagtagcaaatccatggatagcaatcacagctagatagtcacagcattacagagtatccatgaaaagaactgtttacttagcatttagtaaaagtcatagaataccagtatataaacctctggacttacaaattgataataattttgtacatttttcttaagttcttgcttgatcgaatatttctattttcctattagttttaggtttgattaatggatcactgtaaattcagatgcacctttgcactcacagtgaatatatggatgttccttccacttctaattgttccataaggatgtaaaatattcttaaaactgtgaaaatgttaaagcacattatagcacactttatagcctttctttgtatttaccctgcaaacaagtctttgaagcatagaaatctcacctatccataatcacaattgactgctttactaaattttaaaatgaggtggaatcgtaatgtattttaattgctaataggtaataatggctaataaatagcaattggttcaaacctaacaaaagtgggactccatttcctagtgttcttgccactgtgaacttgaatgaggcatttatatattctgtaaaaggttagtaatacaactattctatagtttacttttgcaaattaagatgtatgtgaagataaaatataaataatttgagttatcagaagaaaactaatatctaaatctatggtatcgtatagtgaaattttacagtaacaggagctatttatggaattaactaaaacctacaggtgtgtgttggtggagctcctgacaacacagcttcataaaaaagaaactgcttgactcaaggagacagataaaaagaagtgtgattatattatatgagtttgtggtcatttttccatgaatagttgagaaaatgactatgaaaaagagatttggtaaagaaatgtattattatggctgagcatggtggctcacgcctgtaatcccagcactttgggaggccaaggcaggcggatcacaatgtcaggagtttcagaccagcctggccaacatagtgaaatcctgtctctactgaaaatacaaaaaattagctgggtgtggtggtgggcgcctgtactcccagctacttgggaggctgaggcatgagaattgcttgaaccatagagatgtaggttgcagtgagctaagacagcaccactgcactccagcccaggcgacagtgtgagactctgtctcaatgaaaagtaaaataaaataaaaaaagaaatgtattattattcagcgaaaaaattagtatatgttattgcttatcaagtgttttgcaactcattctaatcaaggcaaaataactttattgaaaattgaaaattacagtctccataaccaagtggttatacattacttagtactttcaaagtgatacctcattgctctcctttaagctcttattcaaagatatattgactgtctaagaatctgtgcaggtcatttctttaaatacttagaaaaggatttttattttactaaggttatctattaccaaaaattaatattgaaatgaaaataaattttaagtaccatgatgaatatttagagctactccaacagtttagtgctatttttttcttgcaggcttgtacagcatatgtggattttatgatttctgtggccagattgattcgtcaggaagaaagattgcccatcgatgaaaaccagcttgctttggaaatgaataaagttatggaattggaaaaagaaattgccaatgtaaaacacatttttttttctgatacactgaataatgtcaaccgctttttttctttcccctctctatcatactttaagagtaaaaggtacagcactttaaccaagtagtaaaaatgcatggcttggtaatagatcattgacttcaaaaggacctttgaaactaaagaattttatagtaaactgggttcctgacatttaaaagacacactaaattggacaaatattaaactagaaacacttaattgccttttataagtggattccatcagaattctaccatttacagtcaaactgttgttagatgcccttcagactcagagcaaatgcaaagctgttttagttttgatatgtatagaatattactttattttaaagtttaaagtgatcacagagattgtctctatttctttgctaagaagtattaacccctgaacatagccatgtggcaatgtgatactactgagttcaaattgtcaggctgctgagctgacggagggtaagacaataattttgcaacaaagcccaaggagtgtattcctgaatttcttctggctctagatcaacccttggagtctgagttggcactttcttccctgatgattctttgatagggcactgcagtctcaagtgagtgaactctgagtctaagcagcatccaggttactgattaaacccatcgtcagagtcagtctaggacccacagagttctctttgtcattgcaaacgacaacctgcatccctgactccctatctgcttgcccctgccatctaagctcatcagaatcttgaagagttaagatcatggagggcaattttagctttcctggggctacgtgaaaccaaaaatctcctatcagaaccagggtgttcttggagctgccactgaatgaatggcatttgaatgggttacatgtggttctgtgttggaaacagacttgctagaggagaaatgtttcctgctctgggtttttgccacttgcaccttcccagaccatgcgctcctttgaccagcatcagctctgtagtgttgtgtcttacctcagcattatgtgtctatattctcactcttgtattagattcttgtattagattggcatgaggccttagacgtctttgaatcatttatgcatctctaacaaaatccagcatagtattgcacaaaggacatgctcaataaataattgttttcagtaaatgaataggtaagtgacctaaaggggaaactggagccattgtcactgagaaataattccaattttaaacctttaccttttgtctcttctcacttaaaattgcttttactcatttcagccactagttggggagttgttattgcaatttttctttttaattcagtgaaagaaataaaattggatgctgctggtctggcaggataggagaacagtcacaaaggtccatgatgttgccattctcagataacttgcaaccaaattgtgctctgtactaggaagtttctctgttacttgcgataaattcttatagaaactcttgcacctttttttccttgctgaattttaactaggacaccgaatggtaatggtgaagatgggagagagagtatttaagagagaaattggagatgactatatcaaagaaagttaaaatatgaaacattcacagacacaactgaactggccattagccatagctcataaatattgcttatatggcttggcagttgtcaaaatatagacagattttttaaaaattttaaacttgaccccacagccaaatctcaataattcttactacttctactccaaaaatctcttacatttcactttttttgaaatgacaaaacaaattacaaaaacaagtacagaataggacttaaattatgttgtacctatcctatatttttaccctcatatgtagttatatttttctaaagaattcttaattctaaaataatgattaaaaattaaatccataggctacggctaaacctgaagatcgaaatgatccaatgcttctgtataacaagatgacattggcccagatccaaaataacttttcactagagatcaatgggaaggtaagtggtaagttttttgtgctctcttattgtgccgttttctaaattataacattgaaatactctttctaaaattcgtcaagtttttatttattgaagtaaatgggacttcaattccttttttttttttttttttttttttgagacagggtctcactctgttgcccaggctggagtacagtgacacaatcttggctcactgtaacgtccacctcccaggctcaagcgattctcctgcctcagcctcccaagtagctgggactacaggcatgcaccaccacacctggctaattcttgtatttttagtagagatgaggtttggccaatctggtctcgaacccctgagctcgagtgatctgccggccacagcctcccaaagtgttagccacaggtgtgagccaccactcttagctggtaaaattccttttaaggcagctatacaataatactagaaactcccataggaaggggtttgaaaaatactaaaactgaaaatctttctgagaggccattatgtagtcatcagacttggacagtcacacaataaaagcactagatttccttttaactccaaaaaaggataatttattcatagaacttcccgtgttctcatcaaggccatctacagaggtgttcagaacaataattcagaaataggacacaaataaaaagaaaagctctctcatagattccatttataaacagcagttgacttctttttccttacctagtatccaataatctctttttgtggctatgcatttattctcgtgtattagttgatgcacacagccaagagatgaagcaatatccatgggaaaacctacaaactaccacattcagcgatgacattctctttggcactaattctagttaacaaggacttttccaaaggcataaactattgagttagacatcttacatagaattttttaatataataagtgtttaataaatacgttttgaaagaatgacctaaaccaccaaaggaaatgaagaaaattgtatagcatagcaccctatactcagtaagtgatgtgtgcttgtgtctgtgtgtgtaaaatacaacctaagatattgatagtcttaaacattatcaattcccatttagaaagacaagatttcatcttttggcaactccgtacttagcttctgaagtataaacatggcatgcctgtagacccaatatcgataattgaaaagatgctgttttctttgacttcataacatcactgtaccactgctataacagtatattttcatctataataggatttccactgagatgtgttactgtgtttgaatgaattgtttattaatacccacttttaaaagctaaacactttacacacatttccatttttgcataaaccaaaaaagctttatttttaaatttaaatttaaattatatttttattttctgtattggttagacaaagaagatgacattaagcctaatttctaggtatatgttccttaagcttaaaggctttgttttcgctcttaaatggttggcttaattatgctaggtaaataatcatgttgcagaactagtttttatttaaaaactgattgaaacaattgaggaagaatcccaagtgaatatcaaactgatccaaccctctaactataactgaatcttggacccaagaagagaaatccacaatttctgaatgtttcatgcctgcttttttccagccattcagctggttgaatttcacaaatgaaatcatgtcaactgtgaatattagtattacaaatgaggaagatgtggttgtttatgctccagaatatttaaccaaacttaagcccattcttaccaaatattctgccaggtaggtatgtcacagtccccatgtcctcaaagtttgcatttcatatcactcttcagaagctttgcagcctcatcttttctgttgctgggcggtggttttttttatacagagatcttcaaaatttaatgtcctggagattcataatggatcttgtaagcagcctcagccgaacctacaaggagtccagaaatgctttccgcaaggtgaagaaaaaatctctcttttcttaagacttaaagcataaagtgatacatggttatgaaggcttaccatgtacactgctaggacatggtgaactttgcaaagggacaaaatgccaaagttcgttatcttgcacatatttaggacatgttgctgaggaagataaatcttcatgggctttaccatcttatgatggtctatgtggcacgatgattgcattgtcctgtaaggagttacatttggttatttaaccagttcatgaaagaatactgtctggattttttgttgttgttactgtgttaaaagtaatttcggggttatctattttaattaatttgattttcaggtgctcattgcacactggacatatacacagatggacaatattgatgtgggcagtctattgaaagtacccctacctggagttaaataagaccttttcttagcctatacctatattatttaaacaatcactgttttggtactatggtgaggggagtaggcagtagggattgaggaaggagagactccagcaaacatgttagttggagtcttggaaagaaaataacgtggactgattaaaatttctagtttttatccttaaaaagaaaatgtagacatctttttaaaattaaagaatgcaaaaatgtattgtgctaaatctcccttacttaggttatcctgttattcttaaatttatacacatacaggttctgtaagtactcagagttcagctaaaaccttgaaaagcagtaatgtgttttctcatataccatatttcccccattacatttattgaatatgacttcacatttatgtttgtgcagtggttacagtgttgtatgtttttctaacgctttctacaatgatattaagttgtaatagcaaaaagttctactggggcatctactgaaaatatgcctagttttcagatcatatataagtaaacaatccatttggattacatttcatcataggctaggaacatgggccttgtgaggagaagtgatgaatatttcaagaacttagatgagacatttgtgaaatgtgtgctcttaacatgctccagacctttccttctggtcaaatgccatttcctttttcttttccgtaggccctttatggtacaacctcagaaacagcaacttggagacgttgtgcaaactatgtcaatgggaatatggaaaatgctgtggggaggctttatgtggaagcagcatttgctggagagagtaaacatgtggtaatgttttcagaataatacactgtcagttatacaggacactatcagtttgttcacactgatgagcaattacagttctccatcatttggctaaaattttattaatttaggcagagaacctctgaatcataatatgccattgtttcccaataaatcttcccttgccttccccaagagtctagttatgtttctgctcctaatactgtctagtctgaaaccaactcaccattttccagaagcagtgtatttggagtacccagtaacatgttctattgatatagtcatttataaactcttctattatcaaaattgcccccaaattagtattttcttaaaaacatagaaagtaaaacaggatttatttggagtataagaaatgtgctttatttttcattgttaggaaaatgaagacagtggaacttaatggtatggtgaaagaatttattgaaatgctactttatgcttagctaaaccactaatggtaatgacagccctaatattttacattagttcttccagtatgatagtgaaaccattatattctgaaaatgatttttaccttaatgcatatattaagacctatttaatcaagagtgtcgataatagcaatattgcttttaaaatataatggtcccatatatctgttagcttaggtcacagtttgtctataaatttacgtttattaacatattaagtcatacaaagatagcatgtagctctatttttaaaaatctgtgttacaaagaatgaattaatgacctatatttgtcttctgttctgatttgaggtcgaggatttgattgcacagatccgagaagtttttattcagactttagatgacctcacttggatggatgccgagacaaaaaagagagctgaagaaaaggtaaagagcagacagctaactagcaaagaaaaatctttgctagtataggaaaaattaactttaaaaacatttagaaaaaaatataatcaaagattgcataaaaacttgtaagctccttcaatatgtagtgtttccagaaagagtttttgtggataaagatatatttctacaattttaatcttttatctctgcaaccaatactctagcaaggtgaaaatattaagtttctgttcaagcaaatgtaaggtggtgcactattggtgcattataagatctataattaaagagatgttgaagaagcttttttataactattcatgcccacccataatgtgcagcttttattgagacttttactgagtttcataagaataggtctaagatttctcaggaaatcttaggtttaaatttactgtgatcatttgtctttataattatataataactagggggaacatgtcctgtgaaaactgttaacatgctttatgagcaacattcacatgcatcctgactaatctctgtagttaggttggcagaaaaagcagacgatttggattgatagaggagacaataataaatgtattttaataagataatcaaccttggtctagttttcttttagaattaaatcacatggaaggactatcttttttcagctctcaaagagccctgagtgggttaggcctagaacctctgcccccagtattgctatctttccatcactctggccagctcttcagacattcaggttggatttgctcctttcatgtcacagctgtgcatgacatggctctgcttggtaaagccagttggattgttctggatcggcatttccaaagtggtgtcacaaaatactggacatgcaagttattccacaagaggctcatggtcaaaagagtttggtgaacacttcttgtaggaaggcttccctcatctcaccctaggctgggttacatgctcctagggtgtgattttattatcatacgtgggagttaatatttatttcactgcttatcattgctgtttacaataagctctttatggttgggggcaggggggcagaaaatactgcctagcattatatcctcagccctttataacatacctggcccttggtagacccttgaaatatattgagtgagtaaattgataaattaatttcccatcctggatatttataataacttatgattctaaccttataatctaacccatttttaattgtaagaagtcctgcaataaagaaacttgcttaatgtttttgcgacagcatttacccgaagtaattcacaataatttttttgtgtgtttactaccttatactttctgtagaatttgtatcctttagaacactctttaaggaaatgtcttacagtaaataaagtatcattaagtgggggctggattgtcatgactgatggcaaacctacaagaaaatgggtttggcctcagtgacttcagtgatacatatgaggcctgatccactgactggggaaatcctgggctcatgtgacagatttgtaataaaactgcatccatttgatgggaaaccatgtaactcagagatacaggctaaaccccccatgaaaaatttaaattaattaaattatttaagagtgatacgaagtggtaaaatcaaaagtcaagtatcattgagaaaatcaagagagaaataaaataaaaatagaaataacaagtagtaaacaagtgataatgaaataataaaataagtaaaataaaccattttaaaataattaaaaatgaactttagaagtagtgataaataggccaggtgcagtggctccctggtgtaatcccagcactttgggaggccgaggcaggcagattgcttgagcccaggagtttgagactagcctgggcaacgtggtgaaatgctgtctctacaaaaaatacaaaaattatctgggcatggtggtgcatgcctgtagtcccagctatttgggaggctgaaatgggaagatcacttgagcccaggaggtggagattgcagtgagccctgattgtgccactgcacttcagcctgggcaacagagcaagaccttgtctcaaaagaaaaaaaaaaaagatagtagtaaatacataataaatatgagctggaataacaaggaaaacctcgttttccacttaactaattaatgtcatttattgaacttgagaagataggtacactgactttggagaataaaggagaacataaaaactccaggaaccaatatttaggactagtattagcagtaaacctataagcccatatctgttttctcagtcaaatcaatgaggcagaaaggtaattataacctgctggaatggaagctgtaaatattacttcttctaaaaaattgaaaaaaaaagctttgagagaaaaagttcataaaagtacaaaatatgtggaacaatgagttttgtcagtttttatgttggttttcttgagaaagctgcagcctataaggataaggcattagaaactcaatttcagacctgattttcatttattcttgaacctcccaggaaagagccattgcaaagatctctgtttaagtatgtcagacactcattttatgaacagtatggatcaagttattcaattgctagtcatgggcagattataaatttgtatctgaaagttatataatcatcttcacattcaatattataattttcataggccttagcaattaaagaaaggatcggctatcctgatgacattgtttcaaatgataacaaactgaataatgagtacctcgaggtaagtctctataaaatagactctggactactgatacttagggctggtagtagtgtcatttttagctatggggtgcctgaaattatatgaagtagcctgaaaccacaggttgtattatataaagccttcaacgctggtgccagaatgatatttgttttagcctttttgttttcattagccaggactatatttggttattgttcatttggtttccatatattccattttaagaaccgtaagtaaaatctggtgtcctttaaagagtatcaaggaagggatagacatcaaggtggtgaacaacaggcaggcttcttatcacattttacacaggcttcgagtttccctccaccttctaagttttcctctactggaaaaaccaattcatgcctactgtattttaaaaacaaaacaaaacaaaccctgatatttgagaactgaaaactattttgttctgccctggtaatgtaacagttaaaagagcagagagttgcttaaagtcactgcagtgctgatttcagactcaactgaaagtcttgctgctaactctgcagtcaccacaactacatgataccctgatgacagcgaggtgatccttgcccaggtcctgggatgacagtgattcctcattcattgattactagtctagcatggggatttgcaaaccatactgccttcttctctctttccatttgcagaagaaacttgactttttcttttaaatgagctggttatagcttgcaagacccaggggtccttatagcaggagcatagtggctacgaacacagactcaaaaccaagttccttgattccagatcccagttccaccactcatttaaacttggtcgagtgactaaactatatctcagtttccttgactttaaaatggggataggagcccttagttcatcggtattaaatgaacataatattagattctattagtataatagaattaaatgagtataatgtaaaatttaaagtacttagaatagtacttggcacatggtaagtactaaagaagaatgtgctattatccacatgtgttatgtgaagattaatgtcattaatgtgaggtttgtttgacacttggtttcatttgattattataaaataatacactgaatttgtgatttggctggaatactgacctgtgatatactaatagaattaggttaactggaactacatccttttttggtaagttttttaatgctctcttttaactttattgactgatataatttaagaaaatccctatgtttttagcaaaaatttagaagataccggttttaatatttcttcccaaatcttctttataatacagttgaactacaaagaagatgaatacttcgagaacataattcaaaatttgaaattcagccaaagtaaacaactgaagaagctccgagaaaaggtggacaaagatgagtgcgtatattctcatttctaatgtgatcatctagaagcaggtctttccctcctttctttgttggattaagtgaaagagcctcagttagaaaaatattaaaaagtacaaagtcctctttttattgagaacttctaaaagcatctaattatggtatactaaagatatggatcaagactttaaccagattaaaatacctttctcattaaggtatcctcaaatttacatgtctttagtttcgtcttatgtcattgcctatcagctcaatttatttgtgaacaagattctcaaaaaccttagcttaagtaagccaattcatagctcctttaagccttctcttaggccttactctgtgtccagaattttcttctgctgacagccccaccttttttctatcagtcaatcccacaactccatccccttcatagatagttaatgtaagacttttctaaccctgtggtagtcaaataggagatactaggaaccattcttattcacagtcttcttatgctcttaatctctgcttattagtgacattagtatttcctaataactattagtttagattttattttttctattaaatagatataactaacatatttatcagcatatgtgtttatgcaccgaaattcctagaaccacttatgttgactttttctccctaggctcttagcccctagacaacaggggctattccttttgaccataaagtctcagcatctagcatactgaagaatctcagttaaaacaaaattaatgagtgagtgagcaagtgaaaaataaatatactaacttgatttgtgtggtaactaacacagtaacatgccaaagaggtgcttgtttcattcatgcattcatttatcctttcatgcatttattaacattttggaacacgaagtccaggtgtcattgggtactgggagaatcaaaggtgaactttgattacattacaagagcagaaggtagacaagacatggtgtaataaactgcaccaccaagagggaaatgtcgtgccaagcaaagtacaaagtgctgtgggcttatttgatgataagactgttctgttctcagtaaaccaagtacaggttggacaaaactgctaatggaaatgccagtgcattttaatccttactcaacatgttgaactcttgcaacactgacgtgtcctgaaagagagagcaactcttttgctgacttctaagttcatattggaacaaatattgtgttatctgatgctaaaaatgggattgcaaatattatagaatgtttagtgtcccatctgggaaagaaagagagtgaatacacatgcttggcattataatcaagttaccatatcctgtctcttgaaacacacaaaaagttatgcaaaataattatctgggtgaatttatgatctgagaaatttcttataagtctgtatatttgtatttctttaaaaatagacatactaagatttaataattgttagcactataaaatatctatagacaaatactgtcaaatattatttctgaaatggccaaattaaccagtacccataggacatcaggaaatttcttcataattctagaaatagttgttgaattattgcttgatgttttcttttgaggttaacgtagtgccagtttcataatcattttgtcatataatttacactgttcattccctttcatcatatgggctgattttctctgcattcttctctttttaagatagataatcaaaagccaaaagtgtatacaatattttaatgaatgaatggtcaatagcacacatgcttcagtagtactttttggtcctccccatgagcttctgatgatcacaaatgcaatatgaattctaaggtcttctctgctatatggagccagctttcctttctttcctatagtctgcctgtataccagatacaaaggttcaaaactctagctgcacatgataatcacctggggaacattttaaaaaacactgattccccagctcaagcaccctagaatgtgatgtaattgttctgtagctggaacccagatactggtattctttttaagtaccacccaccaagtgagaacccctgagttagtgttatttcccttttgtgtgatatcattcctgttcatattcaattttatggaatttttcacaagatgatgcctttaatttggcaatttaggtttaaaatttatttttatcttccaaaataatcagaaaccctctgacagtaattgcatcaaatcattaagactgagccctataggatacaacatgatcgaagctcctctcattttattaaggtttcttgcagggaaagttactgacttattttgaacctgcttaatagtaataaagttggctggacatggtggctcaggcctgtaatcgcgccactgcagtccagcctgggcgacagagcaagaatccgtctaaaaaaaaaaatgtaataaagtcattactcttttttcttttctctttttgtggagcaccaagttcaagtccttgctgtgtatgtttagacagataatttctgttgcttctacttgtccacatagcccgtagttacatcttagagaattacattttcagatgctcaagatcctcactcccaaagtcttgaaagagaaatatgtgtgcatacccaaaactgaagggacagagttgagacttttgtagggttgtattgtagggcacttcagagaaatgatgatgcattaaattttcaagacagcaactaatgtaaatgaattcaattagccaaatagtaaacttctagacacttttttcccccaattcacatgctctcactgggcaaactcattttacttctcgacatcttctatcatcatcatgtcagctgaatatttgtatttgactcagatccatttactaagattcaaatccaaatgtctacatgcttatgaaacatctccatgtagatgtcttattgaccctaaaaacacagcatttgtcatttaggcaaaaaataatatctgcccattttctaaaaacctccattttactgctaccaagacagaaaccaaggactcattttaatcatcctagacttatccctttctgttattcctgacatctacagtgatagttaattcaaatctccattttaaaaaaaaagtctgcatccaccagctgctatttaaatattacgtaggaatgggaagaggggatctctagctcaccattcccatggtcacttctgtaattcagacatttctcactgttcattgactcatctcaattattatcctactttttttaccaaccaccttctatatcttcagtttatcctccacactactaccttagagatttttttgaagacacaaattggcattttatttcctgatgaaaacacttcagtgtatccctgttgcctgtctcatgatgtgtgactgttttgaagagaaccaaggctcttcataccccacactagcactccagagttccttcacattcaccctacacctcaccattgtccaaagctccaaccatatgaattacttccaaatcctttctctgtctttcttacatccttgtctcttaccctggaccaccctttatgccctggttcatctaacagaaacctacacatgatttgattaaactttaagtgtcacctccttcctcacagcaccccattgcatatttctcttcaccttgggctgttctacactttgcacattttggtcaaagtaccagtacattttactacgtttagttggactagcccctattgaaagcaaaaaccagatatttgtgtcaccagagcttaaacactaatgaacagaatgtagctctttatgaatgtttatgggaagaataaatgataaaattgccaatttgtaataatgataataaaactaactcagctgctaaaataaaaatggtcacatctggctgggcccagtggctcacgcctataatcctagcactttgggaggtcaaggtgggcggatcacttgaggtcaggagtttgagaccagcctgggcaacatggtgaaacctcgtctctactgaaaatacaaaaattagccaggcatggtgccatgcagctgtaatgccagctactcaggaggctgaggcaagaaaatcacttgaacccaggaggtggaggttgcagtgagccaatattttaccactgcactctagcctgagcgacagagagacactccgtctcaaagaaaaaaaaaaaatggtcacatccaaacatttcactatcatggctggggaagatacacaacatcatctttaacaaattcaagaaattgaggaagtcaggaagtctgcatgtgagacacccaagttaataatttagctaaaagggcctccctctgctcttatgagtggctggcacctgcaaaggacagggatttacttttttttttttttttaagacggagtctcactctgtcacccaggttggagtgcagtgacaccatctcggctcccacctcccaggttcaagcgattctcctgccccagcctcccgagtagctggaattacaggtgtgcaccaccatgcccagctaatttttgtagttttagtagagacggggcttcaccatgttggccaggctggtctcgaactcctgacctcaggtgatccacccaccttggccttctaaagcgatttaaattttaaaagctcttgattcatgtggtttctgatgcctagtatgtgtttccaaaatcatctcaaacattatgtcttttaaggattttgcgccagtttgtaaagaattttaaacatgtcattataacatagaaatagtgctgaatcgggaatataataccctttggttacttaacaatatttctaaaatatttacttctagtaacatgaattttcatttagagttcatagagcaaacatgaatctctaaagaaaaagatgtacaagaacaaaacaaaatgagtctcttgtttttagacttgatgttattttgttagtttctcaggacagaacttcctgtgatataattgtgatgggtgttgctagtgtttgtgaatcataactgttgagccctggagttaactttttataaagtacaaagaggaatctcattggtgcatctctcttgctgttctgcatcaaaatgaaagcatactgacattgacaggagccaagtcaataaacatttattgagcagctagcttgtgcagagcactgtgctaaacaaaatagatgacaaagaggagaacaagatgttgccctttactcgggagtctatgatcttaaggggcagatgattaaaaattaaatctgatgaaaggcggggtttggttgctgctattaccaggaaacaaagtgctagaacagcacttttttcaaaccacaaagctttacttattagtaaaacacaatttttcaaaccacaattaaacctttacttattagtaaaacattctctggaatcaatatgtcagcatttaaattaatattgaggtgagcagaggattcacaaaaaacaaaacaaaaatgattggctcatttctgtctgccccttggttgcttcaagcatggtgttttttttctaatctggtgcaattggatggtggcacacctctgaaataagtggaacccctaaagctggcagctcaacatctgtgactccgtggtgcatatagaaagttcctgaaaggccagcaccaccaaaaatggcagagcagttggcaccctgggaagtgacactgtagttttgccactgcaatgagtgcctaatactcttttagtgttccagttctgccattcacaacctgtggccttttaaaagccctgtggtttccttatttataaaatgagtaggctgtgctagactgtagaatgtgtctgaggttctttctggcactaaaattctgtggaccttactgtgaagttttcataagagccaggaagttttcctccttggcttctccgcatcaaatgacccaagagaaaaaaacacattcttgagtggcagagaagtacctcgcttctttctaaaatatcccttctgatttttccacttcactaatgtttctagaaccaaccttctttctaactaagttctgtatagttcaacttgagtatcaaaggaaaaataattatgcagaaattatatgggtaaatatgatggcccagcagtggaaagttgatagtctctcgagggtgggcaggcggagcaccggacacttgagacaaatgactctccataaatgtagacggagatgatttgtaaaaaggactatttgactcagcaagtattagccagaaagaagagatacactaaacttgaacaaatcagtttaatttcccaaggcagtatctgccatggcatcctcatgttttgcacatgttgtaacagatgaaaattttagatttttacgttttatgcttccattaagccaacagagtctttgcagattttcattgtgttttggggttgttagcaaaatgtgttctattggcaaaaagatttctgctttttagtcagcatttgatgagggattctgttttgtttcgttttgttttgttttccagagggggaaggggaattagaaaaggaagccgaataatttaaaggctgaaattttaggtagttcttttttaaaaacaaaacgaaacaaaaatatcatcttcaaacaacacaattaaaaggtcctaaacttccatttaaactgaaagaactttgcaaaagaattctgatacatttatttcagtgtcatctcttgaaaggacaacattcaacggtgcacagtttctgacagccaccactctctatgacgtgcatagcaatggtgccctctgccctcctagagtcacaggatgaaatgggtcagcactctgggagcttggaggacccaatgctataccaaggcccaaatagccaagtgcctactatgctcccaccactggtcttagccttaggattcaattaagaacaaaacatggaatattcttgccttcatggaattaccttctaatgagctaggtagacaatagtcttatgtcaagttatgtaagtactgagggttatacagtatggaacaggtttcagttctttcctggaagttctcagaattactttaaatcaggagaaaagtcaccaaagaaaattctgacagaaatgatccacccacccaagtgtctccaaaattaggaatctctccgaaataaagcataccaagtgtgtatgcacatatatgtgcatgtacacatatataaggttagcaaagactaaaaagattgtgccttgttgccaaacagaactacacacaaacaactggtaacatctaggaaaacagtagtaattttccattaccttttgttgaaagagaagtggcttctcccagtttagtgtcaaaatcagagtcctagcctcagacagattcaggtaagtcacccagagtacttcagttatgttaacaaccatatgcaacaatagaagttctttggtcctactgtgcttttgcctttgggtaaaaagttacacttatggatcattgggaagagcctgtgctgtggagtcagggggtgaggggagtagacctgagtcagaattcctgctttgcctcctaacctctgaacctagaatttttcctttataatctggtgataatgacttcacttttgtcctgcatggttgtgttctacgttgtataatgcacctagaacataacttaggtgctcattaaatagtaaccagtgtgacacagtagtaagaaatggtcatcttcatttttaaagaggatggcaagaaaatggcattaatccctgtaatgaaattttgtgtatggtgcagatcaacagcttaggagtaggagatttgattggaaggtgagcaggttcctattcttcttagtttaaatataattttcccagttatataacgtagtttgtaggtgtattaggaaagagattaataaccatattgtgcctcagtttctatacctgcaaatatatggatggtttgaaagatgaataaaagtatacagaaaacttcgaagtcttgatgagagaatattgataattgtaaaggattagagtgattattgtgattacaaggtaagaattctttccacccaggcgactggaggaagacacagaaaatctatcgtattgcactgctgatttcaaaggagttgctttgagactactaaatgctgagaaattgaacactggcagtaccggctcactaacaattttgttgttttcagtttttaagttacacaagagtgggtgaaaaaaatttattctaggtgcttttgcaatctagtgggcttataatacccaaaaggctataggatcagtctgttgtcttctgcttttcttcccagctataaaaattatttctgcacactttcatcagcactaagcttcttcagggcaataagagatagaagagaaacacctggttcctctgtcaggtatatttcagttctattccccacccacattgttagctcagctttgagggccatactgcttctagtggcccctctttgttttactgccaaatgcccccaaacgagaataagcttacctgacaaaattacatctcataaattaaaaataaggtttcttccttcctgcttccccactcttcactttataccacatacatgcccacatttgtatgcatacagaccaccagaggaaggatgagaaatggaagaacagtggttcatctctaaagtctgatactgctctgtggaggctgttagtgtttggcctccacactttaaaggtatcttcaggtaacctacactatctattattttaggggcaagaatcaccaccatttcactttctctttgtgaattttctcttctctgtgctgccagtcagcatcaaatttggactgcattccaaccaaaagaacttacagtttttgttacatcactgtttagttggccctgttaatttagtttttatattaacattgagatattttgtgattgatcacaaatattagacattcagtctatagttgttatcatcaccttatttaagatgtaatgatctaatcacagtacttccagaggttctgattattaccagggacaaaatgtcctgtgcttttggtaattcccagactggtttgagggcacatcaagaaagatctcaaagaagaaaaggcaaatactacacactagtgctgtgtaaacccaaccaccataattctaattttatttgaatgtttggtggtcataaatagctacctattttctttaaggtataattcacagtggacattttaatatgcaaaactctccctgctggaaatttgcaaacataaatcaaaatgcagtcttaaagccctcaatgtaatgtaacagaagagcagaaaagcactaaaacaaaaggtatgacatttatttttacaaaagcaatagacacaagatggataatatataaacttcattcgtgtcctacttttgtgatctattgttatctgaaacattaatttcatatatcctgttcctctcctctgtaatcacagtttaaaaacaacttggattggcaccttttctatttcaatattaggatttttgactagtccagagccaaaaaatatgcaactgttatttgtaattacctgtaaaacccatgtagaattcactgtcactaaaccagaagttcgcaattgagaaactgaaccctaaaaccactgggacctagatacctgttaaattaacttttatagcagttaaaactttaataactataagctgtttacctaaaaaatttgctgccacgtttgctatgaaaatgtcgaggacacatcagaattacctttcagaagtcatgcaaggaacaatgtttccccctaggagtagtaagagcacattttccattttgactttcttgccagacagcttggaatcgtatctgaacctgaattatagtaactgtctgaatatatataaacatagtcataatatatttcctaatcatgatttttgtttattttcttttataatacttcgtagtcacgtcaacgcaatctatttgttctacatcgtttctgatctctcaattttagtctaatatccctgggtttacacatacatgtttttcttgtgagtcaacacaaattatgtgggaagcaaatagagtttaattaaaataaataaaattatattgttgtaatcatcaacctgcaagaaatactaaaatactgatgactcggctgtaatgaaattaaggaggactgatattatcagtccccccccatcctgtttaaaaatgctttctcgatttaaaacaacagcagtaacaaactaaggaagaaacatgttgatcaatcattcttccccatctccaagctttttttcttcctaaagaaaaattaacagaaatgttaactaaatttttttaagtcccaaatcctttatataaaaagtcttgataagttgttgtagacaaaacccattcttagaatttatcagtcagttgttatatattgccctgtgctagttatttttaagagatcaaaataaaattcacttctgacagcccaaaatagttactgacattgtaactaaagcaacattgtaactaaagcctactttgtacagctcacctggcagagcagggtctagaaacagttctgatgtaacctaattgtgctaattactgtacaccccttctgtgagtaggataattgtcatactaacagttgccatgaaagtagaacaactgcagtgaagccattagatgatgatctctgactaccttaaatgtatgcatgtatgctgacatttaagaggttatctgaagtcaagcagtatccatttttccaatgagcaagtaacgatatatgtagtagtctactaagatgagaactttagtcctgttgcgcaaaatttctgaacacatgattattaatatgcagtcttcataacatctgagcagagagacatgggaactttggctcctatcctcatccctcaaattatcatctgggagccatttttttccattttttcattcagcctatagttatttatgcatttttctcatctcctcaactaaactagagtctcctgaagtcaggaactgtattttataaaatctctgggttctatacagagccttagacatggtatagacagacagacagaccgacaaatctacttaagaatgacctgggtttcattttaaagtcatacaaaaatatatctttgctcaattagctggaatgttgtattttttgaaaacacttttaaatggcaataatcagagacatattactctaagacaactacttgagatatcttagttcccaaaaaggttctttgtaaaccaggaattaactatttttaatatacttggatctgaagttttaatgacccacacttcagtattctgtcaactgctccagaatcgttgtcatagttacctagtatcaggaacataaagctaaataaatttcaatacaatcttaacccattgcaatttctgaagtgatacattttaataggttttgcaacatcagaggcctccataaaaatccatgcaaataaaataaaagattacagacttgaatatatgctgatgtttttcaagaaatagaaatgctttcaaatgagctctcacctagtgaactaattttaatttgttgatcatgtttcaaacagaaagttaagattcatctaggaatggtaataatgctttaattgtgtgagtgggttgaatcagataatgcagtatcatttgtaaagagttcttatgttttctacaggtggataagtggagcagctgtagtcaatgcattttactcttcaggaagaaatcagataggtaaggtgtattcttaaataattatttaatatttctctatcgttcccaacctgtagtgcattgtatgaccaattacaatacctctaaacaagcacagctgaggctgagttattgctctattgaatgcatttcttgaaagtaaatgcatccgtgtaccttctttcactatagtgggaaaattcagattggtacaaatcacgttaagtagttttgtttcttttacaatattcttatttatatctaaaatggtttatcttatttctaaatatttttattttatttctaagtaccttttttaaagtcccttgaatatatctatataaagtcatattgactttaagactcattaagcattagcttcttaaagtggtttaaggtttcaagagccaacttttcacagatccagtcctcctggcaattctgtatgctggctctgtgagagatgatcctattctatgtcatcttcattcaggaaggctccaaggggtttagaaagttggaatctcaattatattcgattgaatcgtatgaaattgtatttacctagccacaattgatcaaaaaagaaaaaatttcgtaagttcgcttatagtattattacagacatatatatacattaacacatgaataagttatcatatatgatgaataactgaatgacataatatgacaaaaatattttcttcttcttgggaaggcctggacatctttgaacatacattggctcacatatatcacttatcacatacattggctcattttttttcagggggtttttagcattagaaaggtactcaactgattcagtactgccagaaatattctaaacaaatagtagagcaagcttctgcaggtgcactcagttctccaggtacactcagtcctgcccttcatttctaaacgtggtctagaattaagagagatgataatctcagcattattctaaaccattcttcttatagctcagagtctgttgtaagcctcatttttattgaattctattaccaattagattagaaattataaaaaatcttacaagatatttatcattggctaaaaaaaaactaaccttaaaataaattgtatatttttaggttaaagtttgattatacctttccccgttgctttcaagtctaaaaagagttaggttaagaagttatctacagtttcttctagtatttttatgatttctatttttggagtaaaacctgaatccatctggaatttacgttggtacatgacctgaaactgaattatataaagtaaccagaaaagactgttttgtataacatataaataataagtaagatatgtttacttggcttaaaattacttagctcaaagtctaagctaatgctttctggctagggaaatgattacccaaacccataccagaacgtgcttaataatcaactcctcagaacctttgcagtcagtcctttataatatattatttgaaaccattcaaatcttgttttaaaatgcctttatctctagagagtcttcactttgaagccctctttttaatattcagtagttctgtcagtgtctagttcatttggtactgagacaaacgtaataattaactttcaatggaatcccaagtcaaagcaaggcaacttagactccttagtgctgcattagagcagaataagggatgcagcttcatttcagtccagcccagggaggaccctggatcctatcggagctcatgctggtgcatcctcagtaggaccactctggcatgttcagtccttcagcccttctctagagtaggctcaggcatttatgccaagcaggaccttgtttgattctgaattaccccaagcccctggaggtggctccaaattggcccacttcagggattccccgatcagagaagagctgaaaatattttcattttgagtataatgtcttgaaaccaaagaagcacacagaaaaaggaaaaagaaggtaaaagtggcccaatagtggtctatttcacaaaataaacaataatcctctggtaaatcaagaattagctataataacaattctgaatatataaaaaagaccttttccaagatccttaaaataaggatccaatggaaatataaaataagaaaacttgttaacctcttttcatatgcttgcctggttcttgaacagcagaagaagggaaatccttgaaatgtacactttttttctttcacaatttaaatcttcaaagtggggattgtcttaactaaaaatagttgaagagtcaaatctccatcttttttcttgataggaatgtttatgtgggctgggtgtggtggctcatgtctgtaatctcagcactttgggaggctaaggtgggtggatcacctgaggtcaagagttcgagaccagcctggccaacatggtgaaaccccatctctactaaaaatacaaaaattagcccagtgtggtggtgggtgcctgtaatcccagctactcggaaggctgaggcacgagaatcgcttgaacccaggaggcagaggttgcaatgagctgagatcatgccactgtactccagcctgggtgacaaaacaaaactctgtctcaaaaaaaaaaaaaaaaaaagaaagaaaaagaaatgtgtatgtgtatataaatacacacatacctacctatatacatgtcttctgcaacactgtcttaatggatttgggataatgtccattataaaattagggttggtatagagtaatatgtgccacgtaagtgagcccctccctccatacacacacatagacatacaaatactccaaattagactgcatacactttctcacgggattggtcattttatgttgttatgttaaaaaaagaacttgttttgttatatagagacttactcatatcaataatttctacttcttaattcagttttcaccattttgttagaactcacacatgtaggctacattccaatttgtatgcattcctactcttcatatcaacaaaaaagtcaatttccaagaaagaaggcaaactaaaagtgcttaatccactgttcctcttccttgcatgtttacttcatggagctctagaaggcccctgtgccatgacattaggaaagctgcgcttcaatgttttgtcatatggttctctgtaagttctaggtgctgttcagtcatcttattaaaccttaaaatcgcagtcaaggaaataatttagtgtattctcctttttcattaaaattgcagaaaggatcttttaaatcaatttttttaatttctcaaatgtgtaagttcttcagtgtgttcagtctgtgtcgactataaataccttgagatagttaaattttctaaattgccttatttattcttaggagttttattttcagacttgaaaattaagactgtttccaaacatattgttactccatttaatataaaaagaatgtttagactatgcatggtggctcatgcctgtaatcccagtagtttggaaagctgaggtaggctgattacttgagctcaggagttgataccagcctgggcaacactgtaaaaccccatctctaccaaaaactacaaaaaattaactgggcatggtggtgcatgcctgtggtctcagctacttgagaggctgaggtgggaggatttcctgagcctgaaaggtggaggttgcagtaagctgaggtcacaccactgcacttcagcctgggtgacagagtaagaccctgtttcaaaaaaaaaaaaaaaaagaatgtttaattattttccaccaaaaaaattacttaattgctgccttaggctacatatgaaatattctaaaattgaattgctagcagccttcagaaaataaaccacagaagttgtgctggggaggcaaaaacagggggaagaggagacatggtcttttgcttcatggcccaatgacttatttaattaactaacttgttgacaatcatgaacataaaaaatgcacaactaagcagttggttataaacaacagttgtgatgcctactaggtaacagcaataaggctagtggggaaaatcctccttacagagatttagctgacaaagtaaaaggggaggtcataattagcaaagttgaacttgaagactaatatttaataagaaccataaaatcttatcacttgcctgaagaatggcatatcagggtatgattaaagcagcaggatctttgtagttaatatttagtcttgatagcacatttcataacagcattttatataatgggtggattttaatcaaagtacatagtgtgggagatagtattcactttaacttaataaagtactgcacataatttttatactttaaggtaaaaataagttcatggctccatttagctcaggctgctacacgtgaggtataactttcataaaaattctctaaagacaaaagtacttttttgttgtcgtgtcatttgaatgttatggcaactttccaaatttttgtagaggtctggggagcaattaaattgctcagatgctttttgaagtcttctctgtaaatatctaatatttatccctgaagcccatgcaaggttatactgtgttcagcccacctgaaagacaaagaaataacatgtgctactctgtgttaactagatcttaaatttcttaaggtcagggcccttgttttattttcttaatgtcctgcatagcaatgacccagggctttgcacttaataggtattgatactgaagggtttttttttaattacagaaagtaacgtttcagttattcagtggatgctagagttttaagccattaaagatagaattactaaactatgaacatttaattaatttaattttaatttctttctaaggtcaaagattagttacctccaaataacatgacccaaaatttgattaaacaggggaaatatattccaagggaagatactctccatcttttattagtatttaagacacattattagtatatttcagaaatagtgaaatatatttcatgagagtatatattataagaggatactggaatggggcagggaaggggagggtatgatggaggtggagaggtgggagaggaccctggggccataggccagaaagatgtgtttagctagagagcaatggtaagccttccaaagatttttagcaggagaatgatgatgcccagagttgtctttaatctggctacaggatagattcagagagtagattagatttagaatagattgtagttgtgtgagacagaaagtgggagactgattaggaaattaagtcattcctgagacaaggaatgagagtatgtgtaaacagtaatactgacaggagaagataaagatgctcctgaaagctacctcacccagcctctgcctaagcagacttgtaaaagactgtaaaagaaaggaggcatctaagataagtagaaacatttacttttgctgatagagacccttcaagggccattagcagaaataatacaaagactgagggcctagaggggaaaatgaatttgatgtttgatgcattaaatataacacatttgtgagacatctgaatggagaaagttagcaagttaatgcagatgtcagagtagacatactgaaaactacaattcatttatttattcactaaactctgtaggacacattagtaagttagggtgatcattcatttatttatcattgattattcattgattcagcacatttcctgagccctgattatgttccaggtactattctagttttaggcattgttcaattttaggcatttagataatgaactagaaaaatgtatgaaattaaaaaataaacaaatatatgtacagacacagaaatctctgctctcaaagggctaatatttgaggagctggggtaggattagggcagacaagaaaaggaaggactgtgatcataaagaaataaatagaatatgaggtagtcataagtgccttgatgaaaataaggtaaggttatgtgattgaggtataccttcaattgagtggcaatacttatttaagatattattgtagatggatacaatttctgcaataacattaaaaataatattggtgttactgagtaactatttcttccaaatatttataaggcagaaaggaccttctgaatgaaggttataacttccctttgcttcaaactccttacagcacaaaacaatcttggattgtaaagtgaatcgtgatgataaatcatagtttatagcaccactccaaggtgaactctgttgtcatccataataaaatgcctgcattggtttctattacagaaggtttttgtatataactaagtgaaactgacatagtgaacagcagcttagcaagcacaaagccaaccccaagcctgccatcactgaataatgccatggtggcatgcgcctgtagtcccagctactcctgaggagggaggactgtctctaagaaaataaaaattttaaaaacttatgccacaaataatctctaactatcttctctccttgtagtcttcccagccggcattctgcagccccccttctttagtgcccagcagtccaactcattgaactatgggggcatcggcatggtcataggacacgaaatcacccatggcttcgatgacaatggtaaagtgcagttgacattttcctttggctgaggtatatgctcataaatttgattaagagttattataatttattactacaaagctacatttattcaaacatgtatcatttctctaattttcaccacactttcaattttccctttaaattgttgcttaaagagatcagaaaattctcatagtgagttaagcaatgtgtgctttacactctggcagaatgaagtaaatattcccattgggaaaatactatggtgtttgtcagcggcagtgataatactaggtcttagtttcctggttgtatatgacgtatcttgtcatactcttaaaggacaggctgcatgtctatgtcttaaaatcagatgtaaaatcagaaaatattgcctctccaagagctcaaaagactcttaagctgcttaagagaccttttttttttcgtcttgtacctactacctagttcaagtctttgcaaacagttaggcacttaaatgccaccctaaatggaaaaatcaatttagagtttcaatcaaagctgaattcctgagaggaataaagacgtgaaatatgtaaagaggtgatagttcaatctatgacaaatttcattcacaaatggaaagtagagaacaatagagagaaaatacttaatccccattttagagagccagagaaagaaaaagagacagaaatgttagaattcttaaaaagacttactaagtgtctattaactcaaactatgcaacagtctttacaggtaggttctaatactgtttctgttttccaagtggaaaaaaataaaaacacatgaaagatttgcccaaaggtaacaaagataggaactggtagaaccagaaggtgaattcaagtaggttggctacatagcccttttcttaatcactacgtcataggcaaatatgaaaaagatggtaatattgtgtcaaaacacatgatacatataaatgcaattggagctcaaaagggagaaagatcgatgtagtttgtggttggcaaggaagctgtaggagaaaaagactttttttgtgtgcttgaagtagagggaaactatgagtccacagtgtcctatgaagggtccaggaatataaaaatgccagaataaaaatgttggccattttaaaaatctcaaaatatcaaactaaacagacttgggtcaggtaaaaaccattcaacagaacaaggcataacttcaagaatattttgtctggcggcctcttctgagatatcaagagccaaatgggtgaaatgtctgggtcaatgctgagaagcattagcaaagaaagctctggcagtccaggctttgccaactctgtgatgaggagggatgacagtctctctcatcgtctgcctaatttaatgttctgtcacacagcagtatttcagtccttgcactttgaattaaacatatcttataattcttgttgcaatgagttcccattttacttaaataaatatattataggcagaaactttaacaaagatggagacctcgttgactggtggactcaacagtctgcaagtaactttaaggagcaatcccagtgcatggtgtatcagtatggaaacttttcctgggacctggcaggtggacagcacgtatgtcattagcattctcttgaaaagttttagacatgttcaatcttaagtgtattattggtggtttctttttttaacaatcctaataaagtgtcttttttaacagcttaatggaattaatacactgggagaaaacattgctgataatggaggtcttggtcaagcatacagagtaagtaaaaaagattttctttccattttagtgatttagagtgtttctcatatttaataattcatttaaaaccttttgcaaaaaaagaaactcatataagcagtaaatgatgaatagaaaatggaaaaaaatatgagaagaaagagtggtgaatatgctaaccataagggtcaatacattgatgtgacggagctgaacacttaagtttgcaaagagccaagaagaagagaaaatatggaatattatatcagctgaaatgaggagagagcaggttcacaaaggaggcaacatttttctaagaaataatctctggaataatttttttagaagaaatgtcccataagaaggattatttcagggtctttgaccaatataagaaacaggaccttcagttttgtagcaggtgaagtagcatttgggaacaaaaatcaatgtaaaccacaggcatattaaaccatagttcatatatgatacagtaagggactgacgtgatatggttccagcacatggccttgtagtcaaccacactattatacacagaggactattaacagtggagcatccgttagaatcccatttagccttccattcattcttgcattcaatacatattcattgaggcttaataggtttggcagtattcaaagagctggagataaagcaatgaatgctttatgaaaggtcattatttgaggatctgagcaagggttaaaaaatagtctggtggatgccatgtgcataagaaaaagcagggaatttcataaaagggtggaggaatgatggtctaggaagcaacaaaaaggaatgaagatgattttgagtgtttttctcaactatgaagtagcccatatgtaggagaaagagcagcatctacttgagatgtcacaaggaacaacttgttcctaggctagaactaggcttctctaagacaaggatggatggaatgatcagtggagtgaatgaggatgtagaatcatttgttcattatagaaatgtttggattagagtggaggaggtgaacatcaatggttggatcagggaagaggaagcaccagagaagtggagaaagaggtgactgatggggcctgcagtttgtcagtgaccaaagatgatcagagtgtgaagcttgggagattaagtcagctacaaggtttccaaaagaatgagtccaaccagttccagggacatgggagattgctgctactttgaatgtttagtaatttttttgttcgatgccagacattatgcattttacctcttttttttgagatggagtctcattctgtcgcccaggctggaatgcagtggcacgaactcggctcactgcagcctctacctcctgggttcaagcaattctcctgcctcagcctcccaagaattgggattacaggcatgtgccaccacacctggctaatttttgtatttgtagtagagatgggatttcgccatgttggccaggctggtctcaaactcctgacatcaagcgatccacctgccttggcctcctaaagtgctgggaacacaggtgtgagccactgtgcctgaccgcattttacctctttgggtctggatgttcttttgttcctgtaaatattcttgagctttattctaggatacagttaaattccttgaaaatggtttgatctttttgggtcttccttttgtaacttttattggttgggatggggacagtgttcagtctagggacattattctcaactgctgagataagaatctactctgtgaatcttggggatttccattcttgtcctgtgtaagtaccataaattattatctctaatccttttgagatattgttttcctagcattgggtattttgctcacacacatcttcagatcaagactaagctgaatgcttgaggatgaccatctgtaatctctgaggttctctttttgtgtagctttctcctctttagtaacctgttcttggtgtccctgaactctcagctccttatcctcaactcaaggagtacccccagctctgactggtttgctcctatgatatggcctgaaaactctcaggacaataagctcagcagtcatgggactcactgagagtaaagtttaacatctctcaggggtcattctccttttgcctgatgttcagtgttatgcaaaccattgttttaaatattttgttcatcatttagttgtttccacaagaagttaaatccagtccctatcattccatcttggctgaaagtggaaggcattggcactcaatattcccatggtgattctaatacacagccagattgagaatcactgctataaaatccagccaaagttgggattgatagtactcccatggagaacctcacctagagcaagtacagaattgttaatgatgaagcaaattacaattgtgcaaatattttattacactttgaaaatatgtaaattcttaacgtgtaatgccttgcccccctgctagattgcgagctctctaagagggagcaggtgcaagcctttcccatatccccagcatctttacatagtagaggttcaataagtctatgttgacggtaagtggaagaaatgaaatatattttctgctcatctagttggtcacattcctttgtattaaattggaaatgacacatctcagaacgtttattatgaattcgttttaaaagtttatttagtagaggaaaactcatttttttcagtagcataaatctttaagaattaagaggattttctgacattcaaattacctaaatattttccttcaaatgtacctgaggctcagtccattttgtcctgtcttcaaaagaccagaatagttgcattttattatcctcagactcattggagactaggcctctaagggatctcaagagaatcctttgacttggcaagaatcactcgatcttagtctggtgagtctattttgctaagatagtagtaactaagttaaatgtagcaattgcagacttccttggcaattcatttgtcctgactggtcttattcatcaatttataaaacaacatttagataagtttttcatcacttatttaggtcatccattcattcagttgacatttattgatcacttgacatatgccaggctcttgtcatctactattcagtagcttcttcttttcaaagcatttgtaaataaatttgatttgtctttctaatccataaaatagttgtaggttaccataactaaatgtattatcagggtgattttaacataaaatgttaattacttggtggcatgatcttttacataggtttatatataaccttaggaattaatattattgtttttctattttatcaactgcctaggcctatcagaattatattaaaaagaatggcgaagaaaaattacttcctggacttgacctaaatcacaaacaactatttttcttgaactttgcacaggtattgtgtctttcttgattgatagatatgaaaaccattttgagttataatttcacagtaagttagatgtcacatgctgagttcccttgttttacagagcatttgacttgattcactttcattgtttataatagactgttggatcatattaatgataaataactatgttcctggttgcctttcattgaacattatttgaagagcgaatggttgaggaatgcagaattccaatttaatttttctccttcccctcaacttgctcaaacaaataatccttgattgaacctgagtacatgctttgcttttcctattcctatctctaggtgtggtgtggaacctataggccagagtatgcggttaactccattaaaacagatgtgcacagtccaggcaatttcaggtgcgtggatatgaacagcaatcaaggtgctcttatattgggtccattgcttccacatttggaatttagacttttctaactctgattcttttacatttggaaattcagtgcttttttttttttttgagagtcaaaggtaggatcgagagaacacatcggagcattctacataagcatagccttggccactctctttcttagaatctacaataattataattccttagaatctacgaggctcagggcttgatctattccaacaaagatgtcgcctcagaacagtggctcaatttaaagctagaacaaagatatttctaagaggctgtgaatggtttaggcccagacccaatgagctccaacttgcaaagaaaaatttcaatataaaggaaactttctactaattagaggttcttcaatatggaataacattattcccaaagcttcaggagagagtacattgaagcacagcccatcaaggatgtgagagaaaaatgctctacagagtagaaaactgagctagaagaagttaaagttcttcccaaattagaaaatcaaagagaacaatgattgaagagagtcactccaaccaacatttgaatgttaaatcatagatcctatgtatttgtttaagaactgaattcctaatgctacccctttcccatgtactagaacacttagtcactcatttgctgatcaacaacacctctcaggcaagaaagttaaaaaaaaaaacctaaaaattttgtagggtagttggaaaatgaaatttgagaacaaaagagaactaatgggctaaatttcaaaagctctacataaaatgaatgtaagcatactgcccagatcatttactcctgggaaaaaacacattcgattatggagaaaaacacatttaattatgaagcaataaagtagttcatttaaaaattaaagaatttattcagcttgctagtatcatcgttgtcatcatcatcatcatcatcatcatcatctagtatttgccctaacatttctttcaatattcattcactcaataactgcttatggtatgcctattatctctgtaatccaagctaaatttagttctgctaagatattcaaattaactgctttataggtaatgagcaacaaaagtgactggattaattcccattgtggtttattcaaaaaacttttagttttaatttttttaaagttgtctttttccttactaaagtgaacttaagctttgaggtaagaaacacttgagttccaaccatggcttcaccatttactagctgttaatgtaacctctgtacctcagtttcttgatatgtaaaataaggattaaattatcatgagagttgctagaggattaacgttaatataaatgaagagcctattttgtgtgtgtgtgtttgaaagtccatactaggattatttgtagacaagaggtatgaacagaataagaattcttatgcattttgtaatagttccctatcagtcaaggcttttttggtgctcatttcttatgttctgcacatttcagaatgttagtaactgatcagcagttaagtaaaacgtacataagtatataactgttttctagctccaattttaaactgaaaacaatattttgctataaattagttaaattatttgtatctttaagtctttattgttgttctggttccaaagatccctcatcgactatttttcattcataacaacagaagcgtgtgtgtgtgtgtgtgtgtgtgtgtgtgtgtgtgtgtgtgtgtgtgtgtgtgtgaagggtaaatggaatgggtaaatggaatgccaaccttttgtcaaggaaattattgttttctctggaggtaaggagattttcttggcaaaaggttgagcttacatttagttttggaaacaggccacttcctggctgtacaaagtaaaacatattttttaaaaaaactttaaaaattaatagatatcgagttgctatttaagaattgtgcttggtggttatatagaaatatttctgaattagagagagatttgtaaccttatgtttaaatagccatagtattaaaacaaaaggcaaaatacacttgatacaaagctgcatcataaaaccatatttgctatgtctaacctattgttgttttattcttcctgactaaagctttatttatgtactttaaaataaactttagaagttaaggtataagaatctaattctaaggatagcagctagcatttataagctcataaaaaccaccatgcaacctaatttgtcaagggtttgccctgcatatctccataaactaaaacataagtcataaaaacctaggtgaatttcagtaatattattgtaatacctagtatatctaccatcctcagagaatgagaggttgcaaattaagttttgataggtaaagtttgtctcttttaagtattaacatttttatcttaaccactggattaaaaattatctattaaaaacacatttctaccttcctgccttaaaacaatatcctgaaaaaaaaagcctaaccttttttaaaattttgatgacacagactactttatgattattagttatggttttactgtttattaatttagtctgtggagctatttattcttataccaattgtgatgctttttgacttattttgggtttttattagggtttttctgtgtgtttgtttctttcctagttttctttcctattattgtattgcctgcctttagttccctaattcctccattttgattagctcagaaaacattttgttaaatttaaatggtatttaatccaaaaacattcttcttttaatagtctagaaattgaatctataatttaaatattgacttcattttggaaatccagtttttggttagccatctatagtcatttcagggaatatttattataatatttatatgtaatctataaatatgtttctaaaattatttagctgtaattttctatataatatgtaagggtctgataattttgtaaagcaagtccaaatagacaaaatgatttaggtgcttagattactcaacattatcttccagtcaggaagaaagggcacttttagaactgacaccactatcaaagcaagaaatgtttctcacagcttaatttctaatattttgaaggaatattttgtctagtgttttatatagacatgtcaactaatatggctattttgttccttcataactctgtaatttagcatgctaataagccctctttgaaattcttctgtttcttccatttcccttcaatattagcattggttcctgatatttatagatatcaatatagattttagtgagttttgcagaatttctgttagcccctccaatctttagctgataactagaaatctattacagcatttatttatttatgactgtatagcagaacatacactcatcaatatgactttgctttgaaagaatcataaaaattagttaatgatgaagattggataccttattcctgaatgaaggcagttaactatgtagccaagtcattcatttacaagaattaacaaaaggttgtctgaggacccattaattgcaaacagtaattcagaagtccaattgtagtaggcaggaatagtcagataggatataaagtccattcttggtcccaatgccaaatctcttagatgtttttaatgcaagtaactgtttgccaagggaataaacatcagcagtacaataagttattttacataataaagtaaaaatttcaagtaaatcaccttaagaaataattaataaaagctttattatcttctgttattagaaacacaagcacacagttttgtaaagcatgaaaatcatgtacatatcttctaataacagaggataattcatgtaatgtgatctcactcttagaaaaaaagtgttttattaataatggattcacttttcaaaatagattatctaggcctggcacagtcactcacacttgttaattccagcactttgggaggccaaggagggaggatcacttgagctcaggagttcaagaccagcttgggtgacatagtgggacctcgtctctattaaaaacaaaaaaattacccaggcatgctggtacatgcctgtagttccagctacttgggaggctgaggcaggaggattgcttgaacccaggaggtcaaggctgcagtgagctgtgatcgtgcctctacactccaacctgagtgacagagcgagaccctgtctcagaaaaaatagatgatctattcaaagatttgatgtcataaacaccaaatgttaactaagaaagtaagtgaagccctagtgtgttgttgatctattcaggatcaaattaggtagagtctttggatggaaagaggatgggcagaatgggcatggagagctgagtgcacaccaggctgagtatttctgcagtgcccactctctgcggtgttatctgaagacgtttctttcttttaggtgttttttgtttgttgttttaacttaattttgagatttataaatataaatcctaaaaatactttttaagaaaaatatagaattaagtcgtgggtttggacattattaccgaagtacttgttcccatatgataaaatctaagaaaaaatcctttggaaaaaattaataaaataaaaacaaaaacatgcagctcttccagtcagtgatgctgatggcttaccctgtcaaccagggagcttgctccctagtgtgaggaatgcccaggatgacaggatgactgtctttagccagtagctaggcatcctgaattgggaagaaggttgcattaatgaatcaaagctcctctctaacataaagaatccttgagtcccgcaacctgaaagactaaagaccaatgcaaattcctaatttctaagctcttttaattcctacataaacagtcacttttgactacattatagaagtgatttttttttggctcatgaacaatggaaatttgtttctcacagttctggagaccggaagtctaagatcagggtgccagcatgatcaggttctggtgagggccatcttctggtttgcagactgcagacttctccttgtactctcacatggtccaaatagtgaatttgtttttcaatatttcagatgtaagaaatggacatttgtttttttcaatcaaattaagccaaactctgagctcttagaccaagctaggagatgagccatttactttcagtggtttttcaacgtactctttcagggttattcaggaatctgatatcatcacacaggcatagaaattagagaatagcctccatcttcagcccaccgtggtcactgctgagatccctacagtccaaatgctccagctggagtcagtggttccatttccttccaatgctcatgagctccagagcctccactcttcatgtccaggttctccaacaaccacacgccatgctatcagagggcctctcggggccttgctcagagcaggaagcatcttcttgtcattcacacaacctgccattactggaacctaccccattcttgggaaggccaatcatctccctgacaagtggactaatatataaattccccagcttctgactccacttcacctcaaccctcccacaccaggagattatttttcgtctttaagactcatctaggaatcctaaaaaacaaacaaccagaaaagattacatcctccatgaaagataggagagttgtggtggagagggatagagaagttagttgatgcgttgatgggtgacatattagaaagtcagacttacaaaaaatccatatggatctctcttttctggaatgaggaaagggaaagaaaatgctttctttctcttccagttggtccataatatcaaacaaacaacagaaacactaagtcgtgtttttcttcctaataccctattgcttctctacaggtaatcactgtgaccaaccaggtcacaggttaattcattcagtatgtactgagtcctgtgctggactttgggggtgcagcagtgagcaagacatacacagtacagcatcttccctcagcatctgtgggggtttggttccaggctccctgcagatatcaaaatttgtggatgctcaactccttgatataaatggtgtagtatttgcatataacctatacaccttctccctcctatactttgtcacctctagattacttataatacctaatacaatgtaaatgctatgtaaatatttgttatactgtattctttagggattaatgataagaaaagtaagtccatacgttcagtagacaaaatatttcccccacatatgttcagccgcatttggttgaatccacagatgtggaactcaaggatacaaaggctgtattttgccctcatagaaattagtctagtgggtgtgtcaggaagtaaaaaaggagaacaaatcattgtaaatgtggtaagtgctttgatagggatagtccctgtaagaggagttagtttagatggcattcaaagaagggggccaaggaaggaatatttaagcaaaggcatgaaggctgaggagttagccatgtactgactggtgagtaactttccagggagtagggtctgcaggtagcaggaagctctgaagagggacagggtttggctggtttgaggaactgaaggtaggtcagcatagtttgagcctaaggaggaacaggaagagaaatgtaccacgaggaggctagagaggagactggagccatcaggaggacattggaagccatggacaggagtttagatttccttcaagtccatggaaggttttaaatctgagattatggaatctgatttaaattttacagatcattctgactgtggtgtggagaatggttggaggagagagaagtcctaagatgtacacacagtagtacacctgccacgtagggagaattccataaatcaaaatggactcacctgtcatttgtgcctagtccttccaaaccagtccacttgtctctgggcccctcctcccaacccaagcaaacgtggtaggctggccttagcaggaggagaagggaaggaggtggttcagggttcagggtgggtgtgaaaacatcacctctgcatcaatgtactgacccatctctcccctcaaacactgctaggtgcagatagtgagttggactgtgttgtttttgcccactggggtcagagataagaggaaaatggcattttgccagccctttccagttattcaagctgaatccagcttctgatatttaaggagcccttttggaaaaaaggaaaataatcctctataaaagcaacaaaaaatatctatttaaagtctattatatttaagtcattatgtgagccctttcaagacatagtgagaaatcatgattatattctttgaccaaactcttattataatacaactccaaatacctgcattttcaaatgtgaattattcatgttttacaaacacatataatgcttataaattattaactctccatgacaaccttaagatgcatgttctattgtgcagaaaccaaggcacaaagaagcttcataagcaggattcaagccatgtagtctgtctcccaaattgcttttaactcctgttctttgttacttctccatttaaaaattctgttaatgagaaggcactgactcattgtaccaggttattttaagtttaactttaaattccaaattcattcacttgacctgcagagggaaatgcttcagggctccagtgtggtatggacgtgagtatcaaatgctgacggtgactttttttgtttgtttcaaaggattattgggactttgcagaactctgcagagttttcagaagcctttcactgccgcaagaattcatacatgaatccagaaaagaagtgccgggtttggtgatcttcaaaagaagcattgcagcccttggctagacttgccaacaccacagaaatggggaattctctaatcgaaagaaaatgggccctaggggtcactgtactgacttgagggtgattaacagagagggcaccatcacaatacagataacattaggttgtcctagaaagggtgtggagggaggaagggggtctaaggtctatcaagtcaatcatttctcactgtgtacataatgcttaatttctaaagataatattactgtttatttctgtttctcatatggtctaccagtttgctgatgtccctagaaaacaatgcaaaacctttgaggtagaccaggatttctaatcaaaagggaaaagaagatgttgaagaatacagttaggcaccagaagaacagtaggtgacactatagtttaaaacacattgcctaactactagtttttacttttatttgcaacatttacagtccttcaaaatccttccaaagaattcttatacacattggggccttggagcttacatagttttaaactcatttttgccatacatcagttattcattctgtgatcatttattttaagcactcttaaagcaaaaaatgaatgtctaaaattgttttttgttgtacctgctttgactgatgctgagattcttcaggcttcctgcaattttctaagcaatttcttgctctatctctcaaaacttggtatttttcagagatttatataaatgtaaaaataataatttttatatttaattattaactacatttatgagtaactattattataggtaatcaatgaatattgaagtttcagcttaaaataaacagttgtgaaccaagatctataaagcgatatacagatgaaaatttgagactatttaaacttataaatcatattgatgaaaagatttaagcacaaactttagggtaaaaattgccattggacagttgtctagagatatatatacttgtggttttcaaattggactttcaaaattaaatctgtccctgagagtgtctctgataaaagggcaaatctgcacctatgtagctctgcatctcctgtcttttcaggtttgtcatcagatggaaatattttgataataaattgaaattgtgaactcattgctccctaagactgtgacaactgtctaactttagaagtgcatttctgaatagaaatgggaggcctctgatggaccttctagaattataagtcacaaagagttctggaaaagaactgtttactgcttgataggaattcatcttttgaggcttctgttcctctcttttcctgttgtattgactattttcgttcattacttgattaagattttacaaaagaggagcacttccaaaattcttatttttcctaacaaaagatgaaagcagggaatttctatctaaatgatgagtattagttccctgtctcttgaaaaatgcccatttgcctttaaaaaaaaaagttacagaaatactataacatatgtacataaattgcataaagcataagtatacagttcaataaacttaactttaactgaacaatggccctgtagccagcacctgtaagaaacagagcagtaccagcgctctaaaagcacctccttgtcactttattactcccagaacaacaactatcctgacttctaatatcattcactagctttgcctggttttgtcttttatgcagatagaatcaatcagtatgtattcttttgtgcctggcttctttctctcagccttacatttgtgagattcctctgtattgtgctgattgtggatcttttcattctcattgcagaataatgttctattgtgggacttattacaatttgttcatcctattgttgatgggcacttgagaactttccattttggcgctattacaaatagtgcaactatgaatgtactgcatgttaccatcttacttgagcctttaatggacttatttcttcaaatccttccaaaaattattataagcattgaaattatagtttcaagccaactgtggatacccttaccctttcctcctttatcacaaccaccgttacaagtatacttatatttccctaaaatacatttaaaacttacctaagtgacatttgtagttggagtaataggagcttccagctctaataaaacagctgtctctaacttattttatttccatcatgtcagagcaggtgaagagccagaagtgaagagtgactagtacaaattataaaaagccactagactcttcactgttagctttttaaaacattaggctcccatccctatggaggaacaactctccagtgcctggatcccctctgtctacaaatataagattttctgggcctaaaggatagatcaaagtcaaaaatagcaatgcctccctatccctcacacatccagacatcatgaattttacatggtactcttgttgagttctgtagagccttctgatgtctctaaagcactaccgattctttggagttgtcacatcagataagacatatctctaattccatccataaatccagttctactatggctgagttctggtcaaagaaagaaagtttagaagctgagacacaaagggttgggagctgatgaaactcacaaatgatggtaggaagaagctctcgacaatacccgttggcaaggagtctgcctccatgctgcagtgttcgagtggattgtaggtgcaagatggaaaggattgtaggtgcaagctgtccagagaaaagagtccttgttccagccctattctgccactcctgacagggtgaccttgggtatttgcaatattcctttgggcctctgcttctctcacctaaaaaaagagaattagattatattggtggttctcagcaagagaaggagtatgtgtccaatgctgccttcccatgaatctgtctcccagttatgaatcagtgggcaggataaactgaaaactcccatttacgtgtctgaatcgagtgagacaaaattttagtccaaataacaagtaccaaagttttatcaagtttgggtctgtgctgctgttactgttaaccatttaagtggggcaaaaccttgctaattttctcaaaagcatttatcattcttgttgccacagctggagctctcaaactaaaagacatttgttattttggaaagaagaaagactctattctcaaagtttcctaatcagaaatttttatcagtttccagtctcaaaaatacaaaataaaaacaaacgtttttaatactattgcttttatgcctagtcaactctg

SEQ ID NO: 2 - DNA, 1767 bp, Homo sapiens
gtcagttctccccagagtccccgttcctgggcctggagggctgctttggggcaggaaactttggccaccaggcctctgacctgcaccaggagacactgggaggtttagtccccaaacccgcacagagcaggactgcagcctgaggaaagagcaaggatttcaggagagaggcctgcgacaagtgaggtgagggcttttgggggattgtcctggcgcctggagtgtgggggcctggcaggggccctgaaccgggacagtgaggtcctgtacttgctggcctggggtggacagaacccaagcctgggtaaaatccccagggccccctaaacccaacacttaggaagtcactagtcctgacttgagtttctgatgaggaagcctctctccttagccttcagcctttcctcccaccctgccataaagtaatttgatcctcaagaagttaaaccacacctcattggtccctggctaattcaccaatttacaaacagcaggaaatagaaacttaagagaaatacacacttctgagaaactgaaacgacaggggaaaggaggtctcactgagcaccgtcccagcatccggacaccacagcggcccttcgctccacgcagaaaaccacacttctcaaaccttcactcaacacttccttccccaaagccagaagatgcacaaggaggaacatgaggtggctgtgctggggccaccccccagcaccatccttccaaggtccaccgtgatcaacatccacagcgagacctccgtgcccgaccatgtcgtctggtccctgttcaacaccctcttcttgaactggtgctgtctgggcttcatagcattcgcctactccgtgaaggtgcgtatggccctggcggaaatccagggggtgccggtgagcctggggctccacctgcccacatgctgcctggggtggggacttgtgtgtccctgtgactgtgagtttgtgtgcacctctgccccgtgtgtgctcacgtcagtagctttgtctgtgtgatctgtgtgtgtgtgtggctttggggaatctgcccagtgcaggtctaggaggaggctccaggaggctggctggctggctcagagtctgtccctggctatccattagcccagagcaattctccctatagcccagtaagaaattacaccctcaccttccagactggcacccaggctctcccagaaagtgagaagggaactcacaggtgacttcaccccatggtggggagaacagcctgtgctggggccaaggcagaaggaggatgagccccgaggctcctggagagtctgagcccgggtgaggaaggggaggaggtggtccctgatctcagggcggggaggagacggagccatagcacgcggctctcagctgggggatcctggtcccctcaccatctcctctcccccagtctagggacaggaagatggttggcgacgtgaccggggcccaggcctatgcctccaccgccaagtgcctgaacatctgggccctgattctgggcatcctcatgaccattggattcatcctgttactggtattcggctctgtgacagtctaccatattatgttacagataatacaggaaaaacggggttactagtagccgcccatagcctgcaacctttgcactccactgtgcaatgctggccctgcacgctggggctgttgcccctgcccccttggtcctgcccctagatacagcagtttatacccacacacctgtctacagtgtcattcaataaagtgcacgtgcttgtga

SEQ ID NO: 3 - DNA, 21600 bp, Homo sapiens
agggggcggggcgggccaagggcgggggcgggaaggggcggagtcaggcggaagccggggagaaggcccaggaagtgacggccgcctcccggctaccggggacttctggagtccgagaagtcaacggcgcggttgctgcggccgccgcgctccccggcccgaggcgatggagaacggagcggtgtacagccccactacggaggaggacccgggccccgccagaggcccccggagcggcctcgctgcctactttttcatgggccggctcccattgctccggcgcgttctcaagggcttgcagctggtgagtccgcggtcagggagggcgagcccgggctggggagcggggtctggcccgggcttgggaggccgccgagctccttcgtttcagcttggttgttcagtaaaaggaggtttccacacctctagttccttccctctcagcctggggaagggggcgttaccctccgcccttccgccgggcggcccctcagtcccaaggctctccccatcgggatcccacgaactggggccacccagcctgttaggcgggctcaggaaatgcgtcggagacccaagtcagccacttcaacatctttcactcatcctctatggcgactttcctctcttctctctgctgctaccctgcattatcgcccacagtgcctgtatttagactgtgaagcgctgtttatctttctctggctcttgcggttttcctgctgcgagcccatgggggcagtttaacttgctggacaaagtcctgcgataccacgcgtggcattgagatgtgtgtgtatgtgtgtccggtaaattgtcttctaaaagttttatattgactggaaaagaattatttcaaaattgagcaatatgggttctaagtggaaagtcaaaaggacagctttttgtaagtatgtgcggatagctgaactaggacatggtatgcatctttccattttattgagtttattttaagcagttgaagtaccataaacctgttcgtgaaaacatcaaagcatctttgagatttaaattattcactttacagtcgtgttggctcctatgtactgttccaaccactgatggttgaaccagtttaggaaaaatagaaacagtttaggttctatttctgcaatagaaccagtttaggaaaaatccgaatgcttatgatgtttatgagttttgtcttactttgttttgttttttaaccattctaagtaaaaattagctcattggtttccttggaaagaacttaaattcttacaactcaaatgacccgaagttaaattcttagaactctagtgacctacttttattgaatagaaaaacagaagtcggaaaatcggcactgctgtttagcgatcaaaatgatcacatctgctgatgactgggaaatcatttgaaagcaagtgataatgtggcctatggaacccagtaggatctggccttatctttctcccagtctccctctaggtggttccacactggccacctttaatttattacgaggcatcaggggctctttcctgccactgttcctttgcataagctgttccttctaccttcttccttcttccttctcttctcttgtcagctgtcacatgatgatttttaggtattagctgtatttctctgcagtaaagctaaaattttctacgtgaatagtagaactctttagaacagaaaagaatattcatctgaagctttttttttttttttttttgagaccgagtcttgctctatcgccaaggctgggggcagtggcgcaatctcggctcactgaaacctccgcctcccgggttcaggcaattctcgtgccgagtagttgggactacaggcacgcacctccatgcccggctgatttttttttttttttttggtagagacggggtttcgccgtgttgaccagcctggtctcaaactcctgacttcaggtgattttcgccctccgggcctcccaaagtgctgggattacaggcgtaagccactgcgcccagcccatctgaagcattcttgctgctcgaaaaaaatcatctgtattggtttgctgcccacaaaatctcctgttttcagttgcctttattattttctttctaataaaaagtggcaaagctaaagtaaattttctgattaccttcttatagtttagtaaactgtagtttcgtatctttggaatagaacataaccagtttccttccttattgctgttatagaagaaaacatggaacacaaccagaaatttttgtggtaaatgttatacttggacacagagaagatgaatttgccttaaaagatcgttagactattattagttctccatcattcataagaagaaatggagaaaaaataaaaactaatatctctttatgaaatccatttatttgtttatggggaaattgtcatgttacaggaatgctttctttaatgtggagatttaaaagtactttttcattactgcctttcactttgatggttgtctttttgttcctttgtttgttttgataatgtcttatctcttcacagtaacagtatattacaggaattatccagcaagtcccaagaaggttacatatgaagtcggtaaaagttgtcttccagcctggggctataggcaaggtctttgccttaactcaaattcttcctttagatagattggttgttttactttaaatgtttaatttttttaaaaaactaaacagaattgcgagctccagtaaggaaacaactgtaatggagaaacccgtaatcagaagaggaggtgttttaacaagggacctgcaaaccctgtgaaattttattcaaaatattgtacacttatatgtttgagtatattattctggacccataaatcttaacagaatctcaaagatcctacaagagaaaagcctgctctaaaacttaaaaaccagacattgtgtatatacttaggaaattcttacattagagtcttcggaggttgaattgaattacctctgaggttctttgcactcttaaggtttttttttttttttcaaacctctgaggctccatggggtttgctattacagaactgaattgaatattgaagggatagagagtggagcctgtacacagaggagattagagataaaagaacgtaacttctctatctcttgaagttaacatagctgtgtctgccatttagatatgacctaagttttgttaaaaccctaagcatcccccaactaccatccacccttccagagcttaagaagaaatactcagttgagaatttagtgtaaggagttactggagtcctaactttatgcagtttttcagtttatactatccttagatttgtccacatgttcatgttttattttgtgaatgtttttgagggagtttttgttttaaggggagaattgacgtttggtaacctaattgcttgctgatacgctggtgcagtgacctaaatatgtggaattttctgtgcaacaagctccacattgtatccatgctgtcagttgactatcctgatagctgcacagtactggaattctagtcgctcatctggcaagcagttttagaaatcgccagtgatttttcaatatattacattataaataatgttaccctataagtaccaagaaacagattacttggaagcatttcttatattgatgctcttttcattatttaaatatgaaaactgatgtatagtaaattgaaatgttctatttttaccttgaggaagatcccgtaatgtcagcaaattatatctgaacctttgtaagagtaaatatttgcctaaggcaagggaggcctggcctgtttcttcagaccaatggatttttaaatttgaactttacttataactacaaagtttttaatagtaaagttcattaatttataattcatatcattttgtagatggagctttataattaatggcaaacatttaaaagttctttttataaaatataagtagtagactgttaaattaatggagaattcgtatttaatatagtgaccgttttaaggaacacttgaaatttcagaaaaggtagtgaaactgaggccgggtgcggtggctcatgcctgtaatcccagcactttgggaggccgaggtgagcggatcacaaggtcaggagatagagaccatcctggccaacatggtgaaaccccgtctctactaaaaatacaaaaattagctgggtattgtggcgtgcacctgtaatcccagctactcaggaggctgaggcaggaggtggagattgcagtgagccaagatcgtgccactgcactccagcctggcaacagagcgagactccatctcagaaaaaaaaaaaaaaaaaagaaggggtagtgaaactgaaatggagagatagaggcaggatagtaattatccagtgtttaaatcaccagaactgtaagatcatgttttagtcactgagacttcccaaatctgttgatgttagcaaattgtttttaatgtatgatttaatacattaaaggaaatatacagaactgtgggtttaacttcaaaaagccagtcttacagggaagacctacacaaacatacatactcgtaaaaggaatttaacaaacagtatttcatggggagagaggaagtacagagtgggagtcagagacttgggttcttgtctgtgccgagctaacttggggcttaacctgtcagtagcttaattccatctttgtaaacgtgggagtgggagactatatccgctaagggccctcctgacattaaaagcttgataattctcttaattatatttgggtaaaattttatgtcattagaaggagttacattgggtatacagttgttaagtacttagcttaatattcagtaagcaatatttagtatgatgacttcatgctattaagaacaaaactgtttaccaaaaaataataattgagcctttttacttatgggttatgtttaccatgaatttcttagctaattcagtgacattttttctctcttcctatttttgaccactttggcatttaatgctggtgaccactcatttctcgaaattgttccttcagcttttacactttttttttttttttttgagacgaagcctcgctctgtcacccaagctggagtgcagtggtgcagtctcggctcattgcaacctctgcctcccaggttcaagcaattctcctgcctcagcctcctgagtagctgggactacaggcgtgcaccaccatgcccggctaatttttgtatttttgatagagacggggtttcattatgttggccaggctggtctcaaattcctgacctcgtgatccacccgccttggcctcccaaagtgctgggattacaggcgtgagccaccgcgcccggccaacttttacacttttttctttttaatacaagaaagtgtctgcttaccaaaaaaaaaaaaatcaactaaaaatattaaaataaaaccactttcccacccctcacactaccaggtgtcacggtatgagtaacagtttggagtatgtttacttgctgctttttaaggagttttttctttcttttttttttttttttttgagacagagtctcgctgttgcccaggctggagtgcagtggtgcgatctcggctcactgaaagctctgcctcctgggtttacgccattctcctgcctcagcctcccgagtagctgggactacaggcgcccgccaccacgcccggctaattttttttgtatttttagtagagacggggtttcaccatgttagccaggatggtcttgatctcctgacctcgtgatccgcccacctcggcctcccagagtgctgggattacaggcgtgagccaccgcgcccggtgtaggagttttctttttttaaaaacacttcctgtggcttgctgataagaagttagttgctcttttccctcctacactcggaactgtagaattcctttaggccccacccaatcctctgttcctcctgttttctaacctactaaaccagacaggtgttccctcctgccttcatctaaacatccatattcccttgcatgatcatcacacaaccacacccaactcctaaaccatttttttcttcatccccatccagttaggtcagttgccttattatcatttttggatttactatgcaaattcttgcccttatgaatatgttctttttcatcctccacctagaattagaatgtcctctgtctatccaggttctgtttgtgtctctgcctggtttgagtcctgcttttccactcatccttctccggctccttcgaacattttcttgagattttctaacctacatataatgaatgctcagttaatgtggtataaaatatattgttattattgtttcttgtacattgagcttattactccatcatttgtatcttcctatacgtagaacagtgttggagtgttgctagttcaagtacactttgagctagcaattgcataatgctgtgggagcttacaaaggttagtagcctcagagatgggtaggcagagaattttttttcttttttttttggtagagatggggtttcaccatgttgcccaggctggtctcaaactcctgagtccaagcaatcctcccgccttggcttcctaaagtgctgggattacagatgtgagccatcgcatctggccgacagaatttcatattgactatagcttgtagtgccaatttgttggcctttaacttgagatgggagctagtaaatgtccacactttttttttttttttttttgagatagtctcgctttgtcacccaggctggagtgtagtagcgccatcttggctcactggaacctctgcctcctgggttcaagcaattctcatgcttcagccacccaagtagctgggattacaggcatgcgccaccatgcccagctaatttttctatttttagtagagatggggttttgccatgttggccaggctggtcttgaaccaggttggccagaaggcctcaagtgatctgcccgccttggcctcccagagtgctgggattacaggtgtgagccactgtgccctgccagatgtccatacttaatattgtactccttgattctcttaagatgtccaggcagaacctgcttcctgctattgctctgaggcaataggtcagtaaggtcagtaggaatgccacctgttaatacgtttggaataggacttgtaatgacttgagactgactgcttctggacaagctggatcctgtctttttttactgaaagtagacaagcagcctatgtctgtcctacagataaccttttattgccatatagccttcacacatgagtgtgcctaatagtctaattgtaaaatgagtggttcagctattcccagaccctaattagagttttaggctggtatcttctctcagttaattgacttttatacaaccgaggtatattttgtaaatttctcagagagaaacttttaaaacttggacaagatttaacatagaggcaagaaaaaggcaagtgaaatgttagatatttagtattttattagactatagtcatgttagaactcatcctgtaagtatgattataggagactaaggaagtatctttacacagtggccctctgggatttatcttggtgttgtcactttatatcctgtggtgtaatgattgggaatgccttacctaacacctgtctgaaggaagttgtttgggacatgctgggctatttcatgcttcactaacttacaggaaatcagagaatgtaaccattcatgttacaattagactattttttttcttttatataaattctttgcagttgtggggatgtatacattttgtatagccagtagaagggagaggaaatcccttaaaggtttggataccagtatagatttgaattactattttttaactttttattttgaaattattatagattcacaggaattgcaaaaaaaaaaagtacagggaggtcccacatttgtatgtgcatgtgtgtgtaattctatgtaattttaccatgtggatagctttctataattaccaccacaatcaagacacagaactgtgccatcagcagaggcttccctgtgctacccctttgtagccacacctttcccctttctcttggctgccactaatttgttagccatcattattatttttattattctaagaatgggctatgaatggaatcatgcaatatgtaaccttttgagattggattttttttttcctttgaataattctctggagattcatctaggacattacatatatcaagtttgctcctttttattgctaatattccatggtatggatgtaccacagtttgttttaaccattggacatctggaatgtttctagtttggggctactatgaataaaattgttataaacattcacgtaccggtttttgtacaaatgttaagttttcatttctctgagatagttgcccaagagttctatttctgggtcatatggtagatatatgcttagtttttaaagaaaccgctgaactgttgtttgtccctttttaatgaaaatgttttgtaggataagatatttactattactatgaaatgtatctgttgattttggtagcaatcttgttgccattaacctgtctggttgcttctactggcctgactggagtgagaagggaattccctttagcctctgacttaggtcatcagtcattttgatggtttcggccctcagcaggaaattccctcagcttccacaaaacccacacaaactgcccaagcaaaatactcttcttcactctcttcccttctatttctagagaagagttagccccaaacctgagccctgaatcctatctttagagagccatttttctacctatgtctttagacccacccatcttactggtttctgcctaagtatttaaacatgctcagttctcccatgttgaaattcccttctctttgacctcatccactactgccctatctggccattctttcccagccacacttattgcctatgctgtctctccttcactgccttaccctccccttacttcccaatatacagtattgtaatcgagcttctctccctgactaccctggaacttttcttgctaatgtcactggcaaccttcttatagctcagtctaaggtaggtgtttcagtgttgttcttacttgacctttaagtagcatttagcactcttgattacttgtgtgtttgtgcatgtgtgtgtaaatacttttttcttgtttactacccctttgattgctgctgctagttgtcctttgctggtttcttcccctctgcatatcccgtaaatcttcagattcctcagatttccacataaggctatctttcctcatttgagtcatctcaccctcccactctgccagctcccacatctttatctgcatcttagacctctcctttgagctccagaccttatattcatttgctttccaactacatcttcaccaaactcttccacagacctcctcaatcacagcatatttaaaactgaatttcttctctccctagcacccttgccttttaaaaagaaaaaaacctgactcttttttcagtgaggaccagtatgttagtaccacatatacagcagttggaagtagttaaaacccacttgcgtgtaattgagttgccaatttaaccagagttaacattctccactcaccataccaagcatcctgacctcacaccagtcacccacagcctgccatggccagtaggcatctcattagcactctagaactcttgcttctgtcatcagttgagttgtgttgttcccatactggtttatgctaactatacttttatggccatacagttaaatattacaaagctgaaactgagtgttaaaatgaattgtttctttaaaactaaattgaatgctttggaaagactgaaagataacttactacaagatttatctgccatggaattaaggaagagcaaggcaactgtaaaaggctggtaaaatagtctgactctagaaagattctgaactctgtttctcaagtgtttaagatctcacttcacttcagataacatcagtctggaagtagtagtccatagatgatgaaagtgattaatgcagaaaacatgtggaattcgtcagtagacccataaagaaaatactcacttcagcagattgttaataaatgtgcgtttttaagttaaaatgtttaaggtacacatgtgttatcttgtgttccatattatttgtatgcatcttgtctgatatgagcttttgcatcttgtctgataagagcttctgctgcatctctcagtgattgccactcttctctattgctgctccctagtcgctattatttgccctgatttcctacatcagcttcccagttggatgtccgccccaaggtttgccttacctctggtcccttctccatattgtagccagtgagaactactgaaagcatacacctgatcattgtcaacctttactttaaaatccagactcttaattaacgaggacatttagatctggcctcagcttacctctctagcctcatatactaatttttgtgctgccattctcttcccttaaactctatacttaagccatgttgatttgactcactttgacagttaagttggaggtcggggtgtgtgttgtctgtatgttgggtcagagggcaggtgccatgctccctcatttctggcctttctatatactgcttctctgctgggaatttctttccttaatctttcatcccccaaactgactctgttcttcaggtctcagctttctccttcaggaagcctttcctgaccccgcagttgagcgtctctcctgtgtgcttttataacaatattatatatttcccctttgctggcattagtacacgataggttaattaattctttatttacctgtatttccttcaaggcggccaaactgtaagttctgtgtagataaggtttattcattaatcttgtttgccatagtctcctcattgtaaatatttgagtaaacgtattattcagaaacagctttctaaatactgtagattctctgaaaaaacacttaagtaaaatgttttgcttcatttgtagttgctgtctctgctggccttcatctgtgaagaagttgtatcacaatgtactttatgtggaggactttatttttttgagtttgtaagctgcagtgcctttcttctgagtctccttatactgattgtgtattgcactccattttatgagagagttgataccacaaaagtaaaatcatcggtaagcatgagaaaatatcatccctgtattaatagctgttttgtaatctggcataattttattgttcaaagcagtaatgttttcaaaactcagcaacatgaaaagacagtatcccttgttccaactcgctctgcttctaagcacctcattttttcctaccaaggggatggtagagagggaaagtgagattagaatgagagtgacagacactgccaatagtttacagttattggtggtttaatgtaattcacattagacttaaaaaagcctaggattttgtcacttctgatttctcacttttgagtgtcactcattggttctacaattattaattgtgtgcctttattatatgccaggcatttatatgctagacattggagatagagtaatgaactaatgtgaaatatttctggagctttaaaataaaacaacatttaaagcttaaagcttcagtgattggggaaaataaaacaacatgtaattcttcctatattttgctttaatggtattatgaaaagttgtctataagtgaattaagaatgcatttgttcctgtgttagtttgctaggagcagaatcctgttagaaccaatgccctaccatcttgaggtgctgtcatggctaatgccatcactataggaatttctatgacaatgacaacaggactcatttgttttatgaaatatatattaagaggatacagataatccttagaatttttgttaattatatttgtagtctttggacatttttcttttttacagattaatatgccataagatttggactagggaaaagttctcaagtgtctgagctggttgatttatagtttgaatgtgtaaaaaaaaatgtatatattccaaattctggctggaaaaatttatattaaaaaaattacagattgaaatcattttgtcatttcttaacagtgaaacaatatcaccataaaaatatttttagaaatgtttagtttttattttaatgctgcatctgtagtgtttaaagcacactgatcattttgacaagaaatggtattataatattgtccagtgtagtataatggtgtaacgtaaaaaaagtaaaacctttattatatcaaacttgagcatttaaaaagtcattttagagtaaatactggtttaaaaatactgagaaaaaagaaaaattagtccatcctaaaatagcttttgtattattttgctgtattcctttcaagtctttttattccattcatagttttaaaatttaaaatatttgtaatcatagaacatatattctactttttacctaatataaggatttcatgtttgtttgcagggtttcaaaatcactttttactgtctgcatattaatacacttaggttttaaatattttttcatgcaagagaggttttctgttttagaggaatgtgttttgagtgtgtggtactggtggtgcctaaagaagaataactttttttttttttttgagaagtcttgctgtgttacccaggctggagtgcagtggcgcaatagcagctcactgcatcttccacctcccgggttcaaacgattctcctgcttcagcctcccgaatagctgggattacaggcgtgtgccaccacacccagcaaatttttgtacttttagtagagatggggtttcgccatattggccaggctggtctcaaactcctgacctcaggtgatccgcccacctcggcctcccaaaggaataatattttttaagagagaatgtcttctatcccatgctattgcagtcggagtctattaagaacaacagtagccaacatttttgggacgtttacatttattagtggtatagctcagatttgaactcaggtagactggctctagaacccgtttattgaacactacattatggtctaaaaatgattgtcttgtttcaattaacttgaatgtattccaaatattagtaaatagaattttatatttatatgtaataaatttgaaataatcaaaaggattaaaaaataaagtactacagggaaacaccttttagaagcagagaaaacctctttttttttttttcttttttgagacagagtttcgttcttgtcacccaggctggagtgcaatggcacgatctcggctcactgcaaccttgtgcttcctgggtttaagtgattctcctgcctcagcctcccaagtagctgggattacaggtgcctgccaccacacccagctaatttttgtatttttaatagagatagggtttcaccatgttggccatggtgttcttgaactcctgacctcaggtgatccacctgtcttggcctcccaaagtgctgggattacaggtgtgaaccaccgtgcccggcaagaaaacctcttacattttatataaatgttaagtgaatgattgacaatttaggaattctgtgttaaatagttttattgattttttttttttttttttttgagatggagtctcgctctgtcgcccaggctggaatgcagtggtgtgaccttggctcactgcaacctctgcctcctgggttcaagtgattctcttgcctcagcctccagaatagctgggactacaggcacccaccaccacgcccagctaattttttttgtatttttagtagagacagggtttcaccatgttggtcaggctggtctcgaactcctgacctcgtgatctgcccgtctcggcctcccaaagtgctgagattacaggcgtgagccaccgtgcctggccagttttattgatattaggtttagtggagtttgcagttcagaaaactcaaaaagtatcagacttaaaaccctttggagtggctatcattttaccaagtttccctttctgaatcaagtatatatgtcattactgttttcagttggcatatgagagccttgtgaggtaatgcctgagagagcacttggaaacccatgaaacatctcatgattgtaagctgcattatgataagatatggaagcttttatgtagtagataaactcatcatataagctcactgtagattacccacttggaacagttgaaggcaatgtgttattccagaaagcttcagtgtctaaaaaacacactattggcatacttctatttaataacgggtggtttttaaaattctttcttttagaaagtgctttcaaagcattggagtgctctcagagatgtcatcctaccataaaatactttgaaaggaaagaaaaatgcttttttgctggaagtaagatggaattgtaataaatgctttggcttagataattttaatatgtcccagagaaaaagaggacacacacaaacacttgcacgagatacacacgagatcttttccgggactgtttttttttttttttctttttttggactggataataaaaaatgtcccagttagctgggactacaggctcatgccacctctcctggcataggggattgttgttattaaaagtttatcttgtaatgtgttctctcaataatcccagcccagtgtggatactgtttttttacagggtatttattgaatgccaggcttattgaaaagttagaagtttgggtatgtaagtttgggttgtatcaagaaaaacaagtaagtagccagagctttttaaagttaaaaatgaaaaagttcatttccatgaatctaactgtattgtattccttttgtgttttgtatgtatgcataggatttttatattactttgggaacaggatgtgtgtttttgttggcatccatcatttttgtttccacacatgacaggacttcagctgagattgctgcaattgtaagtaccttgtatttttaacattgcttatttttgtttccttagaaatatggaatttggagagtacttgacaagttatacagcatgttagagttgtttttcttataacttactttttagtgtaattttgaatagaagacctacaagcaaatcaatatgatagcctttaaaacctagagcctatagaatttgactgaattttgtttaaaaaaaatccacttactccacataccgtgtgttattgctaatggaagtggtaaaattgactttattattttatatttctccactttcagttcaataaatgcacacctacatgccaggtgttttctaggtatggagaatatatgggagaaatgattcagagactcagtctagaaaaggagacggaaaagtaaaattgtaatggagtttgttaaatgaaccaatagcagttgttctgagactgggtgccgtggctcaggcttgtaatcccagcactttgggaggccaaggtgagagaatcacttgaagccaggagttcaagaccagcctgggcaagcaacatagtgagacctcatctctataagaagaaaaaaaaaaataatagaaaaaaaagttggtctagacagcagttttcagtgggttatacatatccttaaagtttcatcagacttttcaaggagtatgaggcagagatagtgttgaggaaattaatttccagcttttaaacctccatatgtaatcttttttaaaacttgtatgtctgagaatttatctctggtgaaggagtctcaccggcacttttccaccttcccattcacagtcgccacctaccttgcccctcaaaaagaaaaaaaacttgcttgtcctgaatcttgctggattagttccttcttgccctgctatatagaaatacctgacactgggtaacttataaagaaaagaggtttaattgcctcatggttctgacagctctataggaagcatagcaagggaggcctcaggaaatttacagtcatggcagaaggcgaggcggaagcaggcacatcttacatggccagagcaggaggaatagagagagtggggaggtgctacacacttttaaacaagcagatcttgcagtaactcactattacaagaacagcgccagagggggagtctgccccatgatcctgtcacttccagctaggctccacccccaacattggggattataatttgacatgagaattgggtggggacacaaacccaagccatatcacttattatggtggattaccctgaattgtaaaacaaaaaaacccttgagtacaacaaagagacagttgaaaataaagatccaatttttctctgaaattcttggggccagaatttttttcttttggattcagaatattctggattttagaaaggtagtgctgtacatatgctatattacacaacaccacttgagggcctgcgacagtaccctgtaatctaacattggtatatctgaagtaaaacatatgaatatttatagtaaaagggataagaaaagactaagtagtcttactccatgtaaataggcttactttgtgtcaattttgagccaagtgaatcatgaaaaccttgagttaatgtagttctttgggtttcggaattgtaaattaaggatcatggccttggactggtagcagtgctgtgaacttgaatgactagcaactggacaacaaatcatcttgcaagtcagctggtttccaattaatactttgtttttaacaaaattgaagttaggccgggcgtggtgggtggtgggtcaacgcctgtaatcccagcactttgggaggccaaggcgggcggatcaggaggtcagaagtttgagaccagcttggccaatatagtgaaagcttgtctctactaaaaatacaaaacttagccgggcatggtggcaggcgcctgtagtcccagctactcgagaggctgaggcaggaaaatcgcttgaaccgaggaggcggaggttgcagtgagccaagattgtgccactgcactccagtgtaagtgacagagtgagactccatctcaaaaaccaaaaacaaaattgaagttgtaattaatagagttgtcagctaatacatcattaaaactgcattttatgatagaaaactcaaaaggagttcagagaattgcatggctatatttatctattcatatgacaacagtttcttagcacttacatgtgtaaaaacaaaacatagaaataaaattaacactgaatcttgattcattctagcaataagcaatatttattcatgggtacatgaaccaatagaagagaaaaatcaaagttttaatagggctttatggttaatttcagtttagaaacatttttgttgcagaggagtatgagatggtgatcaataaaataatgagttttttaactcatttttaattttaaaaagctctggctacttatttgtataaaaatacattactataaaattctgtggggaaagtgaaatgaagttgaggaaaaattgagttccagggaaaaaatttacagctataaaaaaaatttttatattttaattagactgtcccagtatttatatttcattggatatatttaatagtgacaggtagtttaaaaagctgatatttataatatgctggaaattaccttttgtaactatttaaattatgaaaagttttatagacttaaatgcatgaggaagttctttttttttttttaattcagaagtgtgtgaacaaaagagctagaagatgacttgtggtgatcagagacagcttcaaaaacaagggtgacatttggtctgagtttgatgtatttaagaaagttgccaggaaaataaggggataaatgccatcaagtcaaaaataaagattccagagggaaaaagacttggcttttgtggcgggggatgggagggtgggaggcgttgataattaaatttagattggatatgttggggatatctgggggacttaatgaatttggagctcagtttactttgtggtaaaatgaggtggaatgcttattctttagaggggggaggagaggtcaggagactgcaacagactgtaagagaatgttattaataaaaatcgtggagatagggagtttagatttggaagagactttagccatcacctacatcaattttctcttttttacagagaacttatctggcccccatatccttaagggttttgctagtggagaagctaaatttgaagcagacgcatggtcttctgtctcttgatagaattctcagaacgtatgatcgtattttagaagagaacagttgaggaagtgatttaaggaagaggaagtaggtagtggcgtcatgtcactgtgtcattgcagtgtgacaactggaacattatttaagtaatttaacctaatagtatcttcaaaatggaatttctgttttgatattaataacttttttcattttcacctaggctgagttgcctagtcacgtattttccttatcgcatctgtgggtcaatctaaccatgcaaatatttttgttttgtatcattttataggatttaatgtttatctgttaaccctactttcatatattagccctccacatataaacatgcacacataaggcagaacattaatattttgtgagactttgactaatagccattattctggaagtttttcttttataacttctttccattttttgatgacttaaaaaaattttttttaccattaaagagtagtcgtgtataagataaaattcatgaacatcttgtttatatgaaacattctccaagccaagtaggaaatgtaagattatattccaaaattctcatataacctttcctcctttttttcctcaggtgtttggatttatagcaagttttatgttcctacttgactttatcactatgctgtatgaaaaacgacaggagtcccagctgagaaaacctgaaaataccactagggctgaagccctcactgagccacttaatgcctaaagactctggggagcagatgttacctaaggtagtgaccctgcattgtggtgcctgagccctggcagaagctcttgtaaaatttgttaattgtttaaaccacttcttttggagagcaaggggaaggtcaagaaggcagttttatcaatattgtgtcagtcaccacaaagtaggccagataagttaaaaaaaatttttttttaaataataattgaaacttatctcaaatggagattttggtgggaggaggagaaaacaattgtttttaaatcacacagctcaacggttgataaatgattctgtcattctgttacaggtcattcttttactaggcttagcttccaaattatgctttatagctgtataaacatcgtgattatattcatctacttagaaattgttttatttttaaattaatttgcttagctgtttgttttgatgcttagattatgttctgttaatgggaatttaacatatttaagaaaccaatatttaaaatgttggtctaggtttttttccttaacatatattaccaggctttactgtatttcactcagccttaaatgttataatatttttggataacggttattaattctttgagaccttcgtatagcctataaaatgtatgggagatgttggtattttatgtgtataaaagcaacaatatcagcaacttcgtgtttatactgcaccttggttgttgatgtcaagtaaaaaaaagattgttttgtaacacataaaaaaatggaagaaactgataccacacctaaggaccaaagataagaaagactttttgcccaagacagtgaaagtaattataaaaacaagctttgaccacttaccaagtatctgaagagatgagttcatactatgatttagaaagtggttcaattcccctgttggcatatgattatttttactaaaattaatacagctctgtgggtcttccttagtgttttctttgaagccaatctgttttttttaggacaccagcctttggtttttcatctgttcgagatgcctcttctctgtctccttatcagatagaaatggagtcatgtgctgctgcttcatctagcagaggttggcctctggctctgacactttttgtcagttgtctttaggtggtcctgaatcttgggcccttttgattgtgaatactgtgtagcaggatcttgagagtccttgttcttacataggcattgctctagtttgtctttggcaaaaaaaaaaaaaaaaaaaagtaaatatccagggaaccctgcccagactaatactgttggtggcataagagaatcaagccattctcaagagataacttcataaccagaattgtctgttggctagcagctgtcacagataggcagggcacttgggatatgacctttctgtccaggtgattcacagactagacctttcttatcctcctcctagagttttgacttgggactctagtgttaagatgatgagcccgtgcatcaggtccttctgcactttggtggaagtctcccagggtaggtttcctatttgaaacagtggaatcatgtttccagtgataaagtttaatgacctcatccttttttttttttctcatctgccatttgtgtgtcttagatgggttttaattgcatgaatgtggctaatgtggttctcagaaattggtcagtatggcccaacatagcttctgctctgtcttactgactcaatacctttaggatttgtatcagagtttggatactagtgttagtggtggtgtcaccactacttaattgggagataatgaaaccaatcatggatgctgtttttattgggcatgtcatctaagagaggagaaatagctgggttttgggtctaattatgaataaggactgattcagaaaacgagtttatggtaggtagactaaagtttcacatcagactgtaccattgtgatttagacctatctaaaattcagagcatatcatctgggctacctcagggtcaccacccatgtattgggcttagtcaggattgacagatacattctcagctggcctgtcatataaaacatactgtcattgagcttaagctccgcttgttctgaggtttcacctccatgtgtttcattggtgcaaaagtggatctcttagttggtcacttaattctttctttttcagaaagatagtatgttcactggtatatttggtcactcttagaaccttccttcacattgttttttatgggacccatgaatggttagcctttcttttctattgtagaaggaaataaataggagtaaaaagaccattgtagtaaataagttcaaggggaacttgggaccagaaaccactgttatgtacaaaaaaatggcaaattcaataaactcaaatttaaaataatttttaaattaacagttatgataaattttatattttatacaaatagattgcttagaatggttctcaagaattataagagaaatgaactcacagtacaaaaattttataattactatacttgtgttttgtttgggggctgggaaatgtatttttacattgtagccaatcattttatatttgtcaatttaaatcttatgggtcttttttttttatctctcttgatgtcagattttatagtctttttaaataaatccatttaattaaaacgtt

SEQ ID NO: 4 - DNA, 39495 bp, Homo sapiens
agcgagctcctcctccttcccctccccactctccccgagtctagggcccccggggcgtatgacgccggagccctctgaccgcacctctgaccacaacaaacccctactccacccgtcttgtttgtcccacccttggtgacgcagagccccagcccagaccccgcccaaagcactcatttaactggtattgcggagccacgaggcttctgcttactgcaactcgctccggccgctgggcgtagctgcgactcggcggagtcccggcggcgcgtccttgttctaacccggcgcgccatgaccgtcgcgcggccgagcgtgcccgcggcgctgcccctcctcggggagctgccccggctgctgctgctggtgctgttgtgcctgccggccgtgtggggtgagtaggggcccggcggccggggaagcccctgggctgggtgggaggtccaagtcggtctctgagacacgcacaggggccggcgacttggcaggtggggagcttggcccgcggtcgtggttcccgccgtcctgtgcctttaaggctctcgccgctcaccagcatttggggctcctgctgtgtcggcccccagctgacttggctttaggggtcggcgtggagggttaaagaggccccggctgggtttgcggagcagccaagcctggcaaaatcgaaagggagggctcaaagagactgtatccttaacccccaaaaagctggtctaaaaggatgggaggccagaccgctgaccgttccccactctcgacagagtccagccgtgtggagcacacgatgctgcaaacttgcatgtcatctctttcaggtgtggcatttcaagggggcttgtgtcttgaaaacagcaactgtgaggacacttgatagtcatttccttcagttctgcttttgtctccctaggtgactgtggccttcccccagatgtacctaatgcccagccagctttggaaggccgtacaagttttcccgaggatactgtaataacgtacaaatgtgaagaaagctttgtgaaaattcctggcgagaaggactcagtgatctgccttaagggcagtcaatggtcagatattgaagagttctgcaatcgtaagttcttcatctttttagaaaagttctgggaatggaatgtatcttaaatttatttttatatacctttggagtgactagtaattgatagttctctagcgttactaaaccccagggtataccctgttggcacgtcacactccagctaattgaagacatttaccaccctgagtaggtcctgctgcttcattaagagtttttcttcctaacactgtacctcttgaacgaactagtagagaaaataaacaataggtattgtttagggagtaaacatataaaatatatttggcaattgccttgagacacatagcgtaaatgatatgttttcttaagtattttataaagtaggacttaccaaatacaactctgtggtggcatttttaaaagctctcaatatttacttcaaaatctgttatacttgtacatatttatagggtacatgtgatattctggcacatgcatacagtgtgtcatgatcaatcagggtaattggatagccagtacctcaaacacttggtgtttgtgtggagaatattccaaatcttctcttcttgctactttgaaaaaatatatgtatatatataaattgggatatatatatagggagagagatatatataattgggatatatatatataaggagatatataattgggatatatataaggagatatatatagggagagatatatatatatagggagatatatatatatagggagagagatatatatagggagagagagatgtataaactgggatatagacaggtagataggttgattgttaaaaatgaataagaggcccagtgaagagttgtttgggggctaacacagtaaccgtgtttgatactgatacctagtagaattaaaagaaatgaagatttcttgttttaggtgaatatacatacagtcatccacaccttatgtgccctttgatttcataaaatatatattggcattatcttggaggaaaaaaatctgttacttacatagccctgtattagctttgagatatatgagtagagataaagataaagagacccgataacctgactttgaacaacttaaatcaatagaagctactgtaaatacagaaattggcacaaatacctttagaagccatgcgtgaaataggctttaactttttatttttatccacaatagaggcagtaggatgaagtacatagtctttgcacatgtatcatgttttaactcttccccatgttattactttatccaatcctccaaacaaccttatgaggtaagttggggctcttacactctttttatggcggaggagacagaccccagtagtttaataacttcctcaagagcagcagcttttacgccaaaaccaaggtgtaaacttgggtcttctgactacaaatccaatgatgacccttccacttgaccatgcctctctagattcacatttgtgggcaatctgtttacagatgtaaatactttatgtatacaatttgtgggcaatctgtttacaggtgtaaatactttatgtatacaattgactcatccttgcccccagggctcatgggaattaaatgagtttgtacgtaaataaatattagctgctattattgttgtgcaggacattagtccaggggtctggaaataccctattcctgtactgtatggtgctgtgtagttctttagggcagggtaaggaaaccaacatttattgaatgccagaactgggccaggcaacttaaatttttttttttttttaagtggggatagtgatatgtgtgtaccaactctacttcctaagcctctagtaactaggaaacaaagtatacatgtgaatacatttgctacattgcaagtgccatggtgatattaatatagttaagtactaaatatgcgcaaagcagtaaagaaagggggttattagggtccagataattaaatatagattataaaacaaaaattgatactacattttttgttgctgcttttgttaatacttttaggtagctgcgaggtgccaacaaggctaaattctgcatccctcaaacagccttatatcactcagaattattttccagtcggtactgttgtggaatatgagtgccgtccaggttacagaagagaaccttctctatcaccaaaactaacttgccttcagaatttaaaatggtccacagcagtcgaattttgtaaaagtgagtaaaattttttaaagtattttcaaccatctggtgtttgggggaaatagtatcccttccttcattcatgctagaactctatgtgtatatattattatataggatgtttcttgataggaccatgagtgtcaatttattttgaattagactaaatatttatgtggtaggaatacttattcattcaaaaatttcacatttaattagtttgaggttacctaaaataaaacaagtatatattctaaattcgttgctttttcaaaacttattataaagagaaattagaattaaagaagtctaagggtcaggcatggtggctcatacctgtaatcccagcactttgggagacagaggcaggtggaccacttgaggtcaggagattgagagtagcctggccaacatgatgaaaccctgactctactaaaaatacaaaaactagctgggtgtggtggcgcatgcctgtaatcccagcttcttggaaggctgaggcaggagaatcccttgaacctgggaggcagaggttgcagtgagctgagattatgtcaccgcgctccagcctgggcaacagagcaaaactccatctcaaaaaaaaaaaaaaaaaagtctaaggataagaaatatcaatggttcagatgatgaatttacatatatgtgcttgataattttttcaaaatttttacctgagctttattgaggtataatcgacaaatattatcttaggtgtacaacatgatgttttgatatatgtgcacattgtgaaatgattaacacagtcaagctaattaacatatctaccacctcacatagttaccttctttgtgtgtatgcctgataatttaattttaaaaaatcaatttgtattctattctagagaaatcatgccctaatccgggagaaatacgaaatggtcagattgatgtaccaggtggcatattatttggtgcaaccatctccttctcatgtaacacagggtaagtttgggcatactaaaaccctgtatttaggaaatgagaaaacaaattaggacttaaggtgagattgttagtttcatgactggtattcacagctagtagcaattaaaacaatccctctcctcaaagacccttcatcatgagctcatcacagttaaatttagtaaaatgggggcaagaaaggaagatttcttaaaccaccagaattctctaaattctgatttcagtaaatatgtgattcaatataaaattttaaatgtgattaataaaaaaatttgagatgatgatacttgcagaaatcttcaaatgttaaatactaaaccaatctttagttgacctaaataatgaatttgcatgagtttttctatatgcaaacaagctgttacaaaacagcatgagttaaagacattcctagtgtgaaagtattctaagttctttgataagttctctgtatagggagaaggaactcattcattgagtaccatcaatgtctcagacactgttgaaaactttacatttattttctcatttcatatctgtaaattaaataattctattttactctgtgtgtgtccctattctttataaagtaaaaatatcagtatcacttgtctcctatacgaaacacagatattggttaggtcatgaacacaaaatctgggaagtactttgaaccctttaaatataagtacattctattattctgtgaagcccatatttagaactcagaggtataaaatgttcaatcatctatgtcatttaaaaatgtttaaaacacttttatgctttctaacatattccccatgcaaataaaaaatgtacatgtcttatctgtttttactctttggatgtcacgtttttaaacttaatttttcttttcctttaaactactgtgtggacttttatcaactactgttttatattcacctaattgtgtagtaaatattttaagataataacctggagaatttgaggaaagtcaaatatgtgtgaatgtaacaaactcttttttcttcccctgttgctttaggtacaaattatttggctcgacttctagtttttgtcttatttcaggcagctctgtccagtggagtgacccgttgccagagtgcagaggtaagagttaaaaaatctaagcactcagattgtgaggctgagtactcaatgataaattaatttctgccccttaagaatattagcacagtgtgtatttgtagcaaacccacctttcaatatatgagtgctttgctaattttaagaccttttctagtgatgttccttcatttagcagctgtgaagataaaccagcaagttttctgagtcccaattcccaaattgtagaatgaggattaaaaacaaacttaggtttgtattgcacttggtcatttattgtctaaccattacttctaaagtcaagtatgataggtgaaagatttccgccccacaattttgtgtaagaaaatagtgtcaatcagagggtctgtaagacttgaccccatatcctaaaacaagtggcaatggaaggcatttaaccaggtctcttatttcaaacccagcatttttctaaaatccagtgttgcctacatgctgcttcttaggattaaaataattaaccgagataattatctagaggggttttaaggtgtgatatattcttatcattagagagataagcttataccgtcaagaagaaatactgtgtctgtatttgagaatcttctcaaagaaagatatggtgcagaaataatattataaatggatatatatccagtcaaatttatgtcaattagagacacatgtctcttggaaattgagaggaataaaatacatgcaacattttaaaatgtaggcttgctttctttccatccttctctctctccacacacaatgtgccctcctgcaaatgacttctgaaggccctattgtcaaaattattgataagttaaagtttttgtatgttactaggggaagaaaactagagtagatttagtgtaatttatcaagcatttatcgattgacactctggtaggcaacgtgtacggtcaactgacacgaagacaaataaaatgaagccgtgccattaaggagcctgtccctgccacacccaccatgtgcccttctttttgagatgtcatactactaccttttttttctcattgtagttgtttttaaatttttcatcattgctacccagtagcacctttcccattttcgttgtccagtaagagacattgtaaatgatagtaaattaaagatagaaaacaaggaaaagctgggccatatcttttgtttgacccaggcaacatgtcacaaagttcagacaaacagtctcccatctgaagccagtattttcacaagcacctgctgtgtcatgaatttgacagaaatgcaaacccactttatcttcctgcttgcacatctaggccacagccttgcttccctatctggtgtcttgaactccatgctgaatattctgatgttcatgttttcctccttgactcttctatcctctctgtgactcagcaaccactgacatctgcatcctgtaggaaagagcccctgttcttaagcaatcccagtgccttcaaatatccctataaggccttacttctttcaggatcattttgattttccacataacttgttttgaccataccaaaaagattgaatggaaagtgaattcttaaacaatgtactgcttcacctcaagtatgtagccctagactataaacacatgaggttgcttcagtgtccatgcgtgaatatggatacgaagaaggaaagaacagtggacacattcactaattgtctatagttatacagaaaacagaggtgctgctagtttacctctgaatagagcctcactgtcagaggacctgtttgcttatctctctgccaatgttttctttttcaaaattttagttgactgatggtatctgctaacctagaatcaatccctgctatatgactatcatgccagacccttctctttatcttaactccccacatctcatccctaaatcattgtgctttacctcctcaatctgtttttcaaacttgtgttttgctctccatctgtatatttctagcatagtttattattcctcctgtggactattgcaattagggccacccctaacattttcagggcccaggcaagaatataaatggaggtcgctggcctaagacccaccttgtatcaaatagcccttcctcttcccacactgtatgggttctctggtgcacataagcggacaactcagcctacatacccaagacatgtccaccacatccaccataacttgtatccaccctccattgtctgttgggttagaggtgagtatatcagcaggatagaccaccctcaagaacatggaccagtgggagggaccctctcaggccctggaaggggtgttggcacagggaattctgggtgctagttcctggagcatgttctggaatggaggagaagtcgtaggacaggctgtcattgagtatatgctatcagcctacaaacatcccaccaacaggggagaaatgcatccagaggagggccagagcacagccttttaaaatgtggggtttgaggcagcaatcttagttgcctgagttcaagagtgacactgatagcaatggcctcctgcctccattctttcactctattaatgtttcatccatattttacccagagcgatctgaaacacagatgtgacttagacatctatttcctccttagagcttattcatatctcctatcacttaaaaagcccaaattccttagtatagtgtacaaggcagccatggtctacctactgcttgacactcaggtcttgccttcatgttttatgccttatacatgcaaactgctgtggtttccatgtacctcttttttttcttttttttaaattgagacagggtctcactctgttgcccaggctgaagtgcagtggtgcgatcacagctcactgcagcctcaacctccttggcccaagtgatcctcccacctcagcctcccttgtagctgggactataggtgcacaccaccatgcccagctaatttatgtattttttgcatagacagggcttcctcatgttgtccaggctggtctcgaactcctgggctcaagcagtctgcccgcctcagcctcccaaagttctgggattacaggtgtgaaccaccatgccccgctgccccttctttacttagctatattttccttactaagagttagttccctagcccatcagaaagattcccaggctggctacttcgggatgacccttgcattttttattgaaatcatttctgaatcttttttcccactagcttttaagacataggaactatatcttgttcagctttgcgcttccaattataaaaaaatgcctggcgtgtgttaggcactcagaaaatgtttgaactgaaccaatggtgtgtgtgtctctgcacactctaagttagtgtaaatcagaacagcttgttgttgctgcttgttttgatccaagaccaaagagtgattgataaatgtgctaagtattttctgtgttcttaagtatgtttggtgtaacataatttggcatacacacatattaaattgccttcattcttaaaaaaaaaaaaaaggacaacaacatcatgcctttagattatgtggaaccattgaattttttctcagggtaactgccagggagtggtccctttttacagtataactaaaaaaacttctgcttgtatttattttgtaagttcagctgctcagtaagattgttttgagtgaagtctctgtgagtccatatgtgctaaaaatttttactctagaagtcaaaatgtaatcctgacatttaagatctctgctgtatccaaaatgatctatacttaactcttaaacatgctgcttgaattttcaactccttgcatttgctagcgtttccctcttagagtgaagagcaacgctttctccgctgttctctctcaaaagcatggtacatattaggtttaaactcaagttctatttccctgcccaagtcttctctgactacactgctttcatctctaaaatcctgcagcattcacttttcctagcaccgttttgatatgcacacatcttactataatttttcttttacatacatgttctgaatcttattatttctatgaattggtctcaaggttagcatttgtcttctacaccatttgcattcaaagctcccacatactaccaattacttaataggcatttataagcatctcttgttggtaatgctgaatttagaaaaatgatattttgatttctttaaaatataatctttaacatgttttgatcttatttgtaaaaatactttactagttttatttatttaaaagatgttggaattgttttttaagaaatttattgtccagcaccaccacaaattgacaatggaataattcaaggggaacgtgaccattatggatatagacagtctgtaacgtatgcatgtaataaaggattcaccatgattggagagcactctatttattgtactgtgaataatgatgaaggagagtggagtggcccaccacctgaatgcagaggtaatcactttggatagttatatttttgctttattcttaccctcaggtctatatgtgggttgcagacattcaatgaaccccctaagaaaaaaatgtaaaatgtttacatatacatatttgtatttttctgtgggacacaatttttctacagcttctcagaagggtctatggcttgtatacacacacacacacacatactcacacatattatgatgtgtatatataaaataggcctcatatttttggcaaatttgcttacatttgctgttttataccatgttgctttcagtaagttaatataggtactttgtttatacaaagagatataaagtggtttattggagggagaatcttagattgaaggctctagatagtgatcatacctgttgcaacaactgggaaactcttgccatctgttgacttcactgaattaacattcaattcttttctgcctccagaatttctattattatccattctccttcatccttctagacgtttttctttcaatgtctttttatacccagaaggtactctcagaatccttcgaactgctttttaaatatattttaaaagaaatatttagaagatcagtgaagctggactaaacattgcctagtatcaataggtggcgtttaagtagtggtgaataccaacatgactcaagcatttgagtatttacttttataattataattgaaattttattagtatgaattttaaaaattccttattaaaatagatttttattataagtgttatacatagacataatgacataatattaaagccagggagatgagtacaaaatgggaagtgaaagtctcttctctatcactagtcctactcggagaggtaacaattttttacaaattcttttgttttattctagaatataaataaacatacaaatattttttatttattatatcaatggtgtgggtattcatttatctaaccagtcctctattgatgacaatttaggttttttgttctagtttgattttttttatgaactattattacaaatgatgctataatattcttgtacatctgtcactgcacatatatgcaagtacatttgtacaataaattccttgtagtataattatttataacaaaggtatgtgaattacatttttcatgcccattagtagcactgctttttaaaagactgtaccaatttagtctcccactgatacaacatcattgtggtgtttgcacctttaatgataatgattgttagggagatttgacaatgtaaatggtaaaaatttgtattatttgaattcatttaattatgaagtttagtgtgtgtgcttttttaatttggccatttgatccagttcatatttatttttccaagttttattaaatgatcagttatttagagcttaaaaaaccatatggaagtacccaagtaggtcatggcaggctgatgcttccattaaaacgactataaaatctcaatagattaccaaaaaattatattttttaaggcataagatacagctgtggaagcaacaaggtctgaatgaactaaaattcctgggggcaggtggtgaaggcaacccatcctgatgtaaggcagttttccctagggacctttgctgattctgaacctggactaaggattcaccttgacccagacaaaagaccacttctaggaaagagaaaccagcaaagctttaatggttatggagggatagggtaatacactggaaattgaggccctcaaatgcagaaccaatttttcctaaaggccatttgcaaattttggggctgcatgtgaggctgggaaggttgacccagagcttctaaagtacaaaatgaaatctctcagaacctgatggtatttggatagcatatacccaccagaggaacaggcttttatctagcataccacaggtctcccctttagcacatctgtgctcattttgaaactgtatagggaaggacattaggtggctgggagaactctgaaggacagacctggatctcctgccaccttccaaaggtgaaacaacaaaaatccgccaggctttcagtcagaagcccggaagggccactcccaaggaacagaggcaagagcagaagtagatggagtcttactgaaactgaaacccagctcaattcctaataggttgaagatatgattacctcaatgcagtctgcttatcagaaaggcatatcatatcatccggatggtttatatacaatgtttggcatacaacaaaagactgttagatatggaaggaagcaagaaaatgtgaccaaatcaagagaaaacaaaaccaaataaagaatatccagataattgagttagcaaatgagaaccttaaaataactgattaacaagtttaagatgataaaagaaaagagaacttcagttggaatctgcaaaaatggtgtaaaatgaatattctacaactggaaaatatctgaaattaagaacacaatagataggtttagctattcaggcagagcaggaaacagtattaggaactgaaagatcggttaaaaatacccaaactgatgcacaaagagaaaaaggaatgtgaaatatagataaaagtttgagacatttgagacatgttaaactgtgctaacacattaggaaaaagagaaagtgagacaaaaaggaagaggggaaggaggaggaggagaagagaaataggagcagaagaaatatttaaaatgatacttactcagaattttccaaaactgataaagtacattagccaacagattcaagaagctctctgactctaagctgaataaaaataaaaccactttagcaaaaaatctaactctaagctgaacaaaaataaaaccactcgtagcaaaaacaaacaacaaaaacttcaaagaagcaacagtataactgattactgctcagcaaaaaatgatgcaaaccaaaagacaataagaagaaatctttaaaatactgtaagaaaattactgttcacctagaattttatacccagttaatatatccttcaaaactgaatgcaaaatagagatgtattcagacaaaaaccaagaaaactttgcactagcagaccaaacatgcacagaatgagaaactaaaggaaattcttcaagtagaatgaaaataatgccaggtaaaacatgaaaatacaaaaggaaatgaacagtgacaaggataaatgaatactgagtttacaaacagtgaatgtaatgtcctgtggggtctgaattatacatagaatacaaatgcacaataacaatgcgaaaggcagaaagaggtaaattcatttaaaggttacacagttctagcagtactgaaaaggtggtaaaagtgatagtttgcataattgacttatagtctaataaatattgtgatctctagggttgctacaaatgaatgacagaagaatacataaatcacaagctaataaaagaataataatggatatttaatccaaaagagaacgagagagagagaagcagaaaggaacacagaatagatgggagaaatagaaaactaataaggttgttgatataaacccaagtatgtcagtaattatgttaagtgcaatttgaccaagattgtcagacttaaaaagattttaaaaagaacctagttctttactatttacaagagacacagtttaattacaagaacacagaatagttgaaagtaaaggatggaaaaatataccatgcaaatattaacccttcaaaataagctgacacagttacattaatatcaatgtatattttaagatgaaacagttcataatgataaggaggccaactcaacagtaatatatcataatctggaatctatatgtacttgataaaatagcttcaatctatatgtagcaaaaatggacagaaaaaatagacaaatacacactcatagttagaaaattccacacctatctcaatagctaataggacaagcaaccaaaaatcagtgagactaaagatctgagcaacaattaaacatatatacatatgagaccattgaatctattaggaccgatgacaggtatgttttttcaagtgcgcatgggctatttaccaaaattgaccctttgctgggctctaagctacaatacattgcaaaagattgaagttattcagagcataccttctagccacagtggaattaaactagatgtcagtaacgaaaagataactaaaaaattaacttctaggaaatttaaactctaaggtagtatatacattctctggatcaaaactgagaactaacttgatagaacaaagaataatttagaatagtttttatataggagggtcttagaatgaaaagttcataaaaaaactttacttatcttaataatgattatcattgtttgagtgcctgctaaatgctgttacctgctaggcgttttactcaatttatcccttatagcagcctgtgagataggttaggaggcagaaaaaaatgaccgataccatctgagttcctagggcatcccgtgtgtgatggggctggcaacagtcatcctggatgatgtaatctcttgcttcagggacagacactgtgaaatagcttactcaattatttcccttaatccttcctcaataataattactcaatctgttctgcttttatcctcattttacagatgaggaaactatagcttagaagggttagggacttgctagagctcactaatacgtggtgaaatcaggcttcggcactacccaatactgcctcaacaggggactttgtataagtgacccaatggcagttgggctctgaagactgaaaaagttgctctgctgttagatttatgcttttcagaatatgttcttaatgaaagtttcacctgacttgttatctagtctgaaatctaaagaggaactggtgtatggaaagttggtaaccagcacaagagaattaaaaggagttatttttactcagactcgagtatcactttaaacaagacgtgaaacaaaacaaattctcaggctcattaaggttaagtgatagaaaaggctgtgactgtctctgttggcttagttgttctagaacaacatcctgttgttctttagtattagcacaaaagataatttgggagacaaaatagagatgtgccacagaataagatcactagtgactctttgatttgtttatttcacaagaagcagcttaagcacctcagtatactttggtataagtcttctttagttacccataggtataatttatatcaaagcaaacgcaacttagaacttcagctccttgagaaatactcaataagagttggtttcctgaaagtcatacctaggtgtttgtggggagagagaaaggatagccacagagcaagcaatggctaagaatgttaatgtggccagcaatatttagctaacttgtttctcaaccttttctttcacaggaaaatctctaacttccaaggtcccaccaacagttcagaaacctaccacagtaaatgttccaactacagaagtctcaccaacttctcagaaaaccaccacaaaaaccaccacaccaaatgctcaaggtacagagactccatcagttcttcaaaaacacaccacagaaaatgtttcagctacaagaaccccaccaactcctcagaaacccaccacagtaaatgtcccagctacaatagtcacaccaacaccttagaaacccaccacaataaatgttccagctacaggagtctcatcaacacctcaaagacacaccatagtaaatgtttcagctacaggaaccctaccaactcttcagaaacccaccagagcaaatgattcagccaccaaatccccagcagcagctcagacatctttcatatcaaaaaccctatctacaaagaccccttctgcagctcagaatcccatgatgacaaatgcttctgctacacaggccacactaacagcccaaaaattcaccacagcaaaagttgcatttacgcagagtccttcagcagcacgtaagtccactaatgtacattccccagtgactaatggtctcaagagtacacaaagattcccttctgctcatattacagcaacacggagtacacctgtttccaggacaaccaagcattttcatgaaacaaccccaaataaaggaagtggaaccacttcaggtcagttgacactgttcaggtttactgagtatggatctaatgtgctatggtggaaatatgaacttgaccaagattgcaggattaaatggtctctaatttattgtagccagggtttttcatactaatactttttactttatttggaagcggacttggattgtactagggcaaatctttaaaaaaagaaacatttacaataatagagaaaaagactgtggccccattaaaaaaatgctaaattaagattggtaaaaaaaaaaaaattctgtttcctgtagtagttttagggagtcaacgaattattcaagaccccttcaaagaaccaaatatgtactgtctttaaggctgagtcctgggtctggttcattgatagagatccatccctcaaagtatgctaaggaatcttcccggattccctagagttgcagatctgctaaagcatctcaatagtgtcgtctaagtaattgaaaatacagagatcctttcaaatagttcgtattattacaaggctctataaacgataggttctcagtggcaccaagtaattgtgttttatctatagttttacccattatgaccgtattttcaaaatgattttatatatttcataattgttaccttgaagcctattttgccagcacctggatatttttaagaatttaaacattatggatgttatcgttaaagttcccttaaaacatttccccagcccatttttctccctctaaggcaattactgccctgaaactgatgtgcttacttcctgtctgttttcattcttatactccatgtttccataagtagtacataataatgtttcatatttttaaaataatttacagaaactgtgtatgtttcattacctcttagcactcagcattggttttgtggcttacattgattaatttagatttactatactaattttaattctttatgtggtttttttacttctttacaattttatgacttctcttggtctaaaatttctaggttgaacacgtccagtttttaatagggcaaggcaaagagaaataagcatcacttataaatttgttatagaactaactttattgacatatttccttctgtaaaaagtataagataatttaagacatttaaactgaacctgatgagtcaattataatatatcaatatttgggatcaaattttactcttaggtacaattaatttactctttcagggcacaatataaaaaaattgtagccaccacttactgagtatatactatagtgatatgttccgttcaccttctgtttgatgccactcgtctgtaccacaaccttgcaaagtatcttcagattgattttatagatgaggaattagaggcttagagattaattcatccagttcatatccagtgcacagtttaatcctgcactttttctgctgagtaatattgcttgttctaaatggcactcttgagtcaatgtgttcacctcgcttaggagagcagcttatttattgttataaatatgcttatctgaaagtaaatttatttttgcaatgccccatccgtagtcattgaaagatataaataataaggtgatatggcatttttgagttttgatatagtctgctaaaagggacttagtcgtcttatagtttcttgttagtaggattggatcagcaattatttactgtttaagttttcaaacatgtttcttgccctcaagtcctataaccaaatttaaatggcatttgttttggtaatcaataactctttatcataatttatatttacagtgttgattctgttgaacaggtatagacagtaatgtttacattctacttgattaagttaatgtgtaattgtttttataaatttataattatttcatttgtggaaatttgagttgctttcgagttttctagtgtagtttattgatagtatatgaaattgctagcaaatcaatgactttaacaaatttttgttgttaatcctttttttccccttcgtctgtaggtactacccgtcttctatctggtaagtttggctctcaggccattaaaagaaattgttttcactgtgggatatacaatccatattcctgggagataatattgtcttcttgtttttaaaaaaatgtatcctgcaatttatttttaaactttttagtatggaaaactttaaacgtcactcaaatagggaaaatagtacagtgaatcctcatatactcgctcggattcagcaattttcaactcatggatacccacttcacccacactccctggattatttggaagataatcccagacatcgtatcatttccttcataaacatttcactaagtaacctttataaaaacataaccatgtagcatacctaaaaaaatccagtaattccttaatatcagcaaatatttagtcaatatccaaacttccctgattatcttataattttttaattgatacataatgttttatatatttatgaggtacatgtgatattttgttacatgcatggactgtgtgattctcaagttggtatttggggtattcatcaccttgagtattatttttgtgtgttggaaacattttaggtcctttcttctagtgactatgaaaaatatatcacacattattgctaactatactcaccctactctgctattgaatattagaatgtaatccttctatctaattgtatgtttatacccatcggccaaagtctcttcatcctccctcctactcacacacttttctcagcctctggtatctaacattcttctctctacctccatgagaacttttttaggtctcacatgtgagtaagagcatgtgatatttgtcttttttgcttggcttatttcatttaatataatggcctctagttccattcatgttgctgcaaatgacataactttattctttttatggctgaatgtatttcattctatatatgctagatttgttttctttcttttcttttttttatttttattttttttttgagacaggttctcgtcctgtcacccaggctggtatgcggtggtgtgatcgtagctcactgcagtctcgaactcctgggttcaagcgatccttccacttcagcctcccaagtagctggtactacaggtgtgtgccacgacacccggctaagtttttgaaatttattttttgtagagacaggattttcctatgttgcccaggctggtttcaaactcctggccgtaagcgatttttccggcctcccaaaacgttgcgattataagtgtgagccactgcacctggccccacattttctttatccatttgtacattgatggacacttaagatgattccatatctttgctattgtgaatagtgcttcaataaatatgtgaatgcacatatctttttgatatattggttttattttcctttggataaatacccagtagtgggattgctggatcctaagatagttatatttttttatgttttcaggaacctccatattgttttccacagtggttgtactaatttacattctcaccaacagtatataagatttcccttttcttcacgtcctcaccagcgtctgttattttttgtctaaaaatggccattctaactgaggttaagaactgatagctcattgtggagcttgatttgcatttccatgatgattagtgatgagcagtttttcatatacctgctgagaaatgtctgttcatgtcttttgcccactttttagtgtgattatttgtttttcgctagtaagttgagttcgttgtatattctggatattagtacctttacagatgaatagtttatagatattttcttccatttagcaggttgtctcttcactctgttgattgtttcctttgctgtacacaagctttttagtttaatatagtcctatttatctatttttgtttttattgtctatgcttttgaggttttagccattaaacctttgcctagactaatgtcctgtagcatcttcctgatgttttcttctagtatttttatagttgtggatcttatgtttaagtttttaatcatctcgatttgatttttgtacatggtgaggggcagaggtccagtttcattcttctgtattttcccagcactatttattgaagaaggtatccattttccaatgtatgttcttggcacctttgtaaaaaaatcagttagctataaatatgtggatttatttctgggttctctattctgttccattattctgtgtgcctgtttttataccaataccatgctgtttttggttactataaccttatattttgaagtcaggtagcgtgatgctgccagctttgtttttgctcgggttgtgttagctctttggactcttttggttccacaatcattttaggacttttttttttctatttctgtgaaaaatggcattgatatcttgataggggttgtactgaatctttagattgctttggcagtgtagtcattttaacaataatagctcttccagtccgtgagcatgggatgtctttccctttgtgccctcttcgatttcttttatctatgttttgtagttttccttgtaggggtctttcacctccttagttaaatctgttcctaggtattttatttatttttttagttattgtcaatggaattgccttcttgatttctttctcagtttgttcattattgtatagaaatgttattgatttttgtatgttgatcttgtttcctgcaactgtactgaatttatcagatctaagagtttttggtgaagtctttaaggatttttttttacatataaaatcgtatcattaaaaaagagggacaatttgacttcctctattccagtttggatgccttttatttctttcttttgcctggctgcaagttaataaatgaaaacttggttctctatgagccaaatgaaacttggttcttcaatgaaatggaaactagggcttacagcattatgttgaatagaagtggtgaaagtagacatccttctcttgatccagttcttagaagaaaggctttcagcttttcctcattcaacagaatattagctgtgggtttgtcatgtatgacctttatgatgttaatatgcttcttctatgcctagtttgttgagagttttattgatttctatgtgttgaatcatccttgcatccctggtcgaaatcccacttggtcttggcatactaattttttgatgtggtgttggatttggtttgctaatactttgctgagaatttttgtgtctatattcatcaagagtattggcctgtgattttgttgttcttgttgtgttcttgtctggttttggtatcagggtaatgctggccttatagaatgagttagggaaagtttcctcctcttcaattttttggaattgtttcaggagaattggtattagttctcttttgtatgtttggtagcatttggctttgaatccatccagtcctgggcttttctttgtcaggagactttttattacaattcagtcttactactcattattggtctgttcagattttctgtttcttcctgactcagtcttgatagggagcatgtctccaagaatttattcatttcctctaggttttccagtttgtcaatgtataggtgtttataatagtctctgatattttgtatttctgtggtatcagttgtaatgtctcttttttcatttctgattttatttggggcttctctctttttttcttggttagtctagcaagtactttatcagtttggtttatcttttcaaaaaaacaagttttcactttattgttttttagtctctattttgtttagctctgctctgatttttcttacttctttccttctgctaattttggggttggtttgttcttccttctctagttccttaagatgcattgttagattgtttatttgaaatctttctacttttttgatgtaatcatttattgctgtaaacttccctgttagcactgcttttgctatgtctgataagttttgctacactgttgccatttctattttttcaagaaattttttgtctaatcctgaatttctcccttgacctaatggtcattcagaagcatgttgtttaattttcatttatttgtacggtttccaaagttcctgttgttattaatttctagtttaattccattatggtttgagaagatacttgatacaattttgactttttcaaatttattgagacttgtttggtatcctaacatatgttctattctggagattgtttcatgtgccattgagaaaattctgtagctattgggtgaactcttctgttagtgtctgttaggtccatttggtctaatgtgcaatttaaatccaatgtttctttgtgaattttttgtccagatgagctaatgctgacagtgggatgttgaagttcttaacaattattgtattggagtctatccctttagattggacaatatttgctttatatgtttgggtactccaggattgggtgcatacatacttagaattgttatatcctcttgctgaattgatctctttgtcaattatataatgacctcctttgtctctttttactgttttttacctaaagtctgtttcatctgatataagtacagctactcctgtttgtttttggtttgtgttagcatggagtatctttttccatctctttactttcagtcacaatgtgttttcacagatgagatgaatttcttgaaagaaacgtatagttgggttgtgtttttgcatccattcagccagtatacatcttttaagaggaaagtttaatctgtttacattcagggttattgatatgtgaggaattattcctgtcatcttattaattgatttctggttgttttgttccttttgttctctcttattattgtgatgtagagtttttctttcataacattttagtcttttctcttctttgtgtgtttgctctaccagtggtttttaaaatttctgtgtgttttcatgattgtagatatcattctttctcttctgggtatagcactcccttaagcatttcttgtaagccatctcatggtgatgaattccatcatggtgattaattccatcagctttcttttgtctgggaaagacattgtttctccttcatttatgaaggataactttcctaatccttggttggtagtctttttctttcagcgctttgagtatatcatcccgttctctcctggcctgtaaggtttctgctgagaaatccattgttagtctgatgggtttcctttataagtgactagatgcttttcccttgctgtttttagaactctctctgtctttgacttttgacagtttgagtatagtttgtcatggagaaaacctttttttttttttggttttgagacagagtctcattctgtcactcagcctggagtacagtggcgcaatctcagctcactgcagcctctgcctcccaagttcaagcgattctcccacctcagcctcctgagtagtagctgggattacaggtgtgtgttaccacacccatctaatttttgtatttttaatagagacagggtttcaccatgttggccagtctggtctcgaactcctgacctcaggtgatccacctgcctcggcctcccaaagtgctgggattacaggcatgagccaccgcaccgggccagagaagacctttttaaattgtatctacttggtgatctctgagcctcctgtgtcaggatgtctacatttcttgttagacttgagaaattttcctctgttgttttagtaatagattttctaatcctttcactttctcttcaccttctgagactcctaaaatttgaatagttggccactttagggtgtcccatatgtcatgtaaactttgcccatttttttattcttttttccttattcttatctgactgtgttatctcaaaagacctgtcttcaagttctgagattctttcttctgcttgatctagcctattattgatgctttcaagtatattatgtatttaatatttcatcaagtatattatgtatttcatcaataaattatttccagaagttgtttggttcttttatatgtatctttttttgataaacatctcattaatatcctgaattgtttttctgatttctttgtatttttttaaaacaaattttaaagtttgtatctcacctccctgagcttttttaatatcacaactttgaattcttttcccagaattttgtaagtttacttttgattgggatctgttgctggagaattattgtgttcctttggtggtatcatattttcttgttttttcacgtttcctgcatcctgaagttgatatctgtgcatctgatgtgatatttgctgtttctaatttttcaaatttgcttttgtaggggaggacttttcctgaagatgtatttatggtgtcagttaggtggggcactttggctttaattctgggtgcatgcagtagtgtagtttctgtatgactttcagctgtaaatatcatcagtggtatctgtcatttcctcagtgctttaggatgcggttactagtggagatttgctagggaataggatgccatgtgggccaatgttcggacccaagtgttggcagtggtgggctgagtttgcctgtccttgggcccagggtgatgttgctggcaccagtgttagcaagcccaatcaggccagttattgggtctccaggtggctcacttgggtgccagaaatggcgggtgacctggttctcaggctacttggcagcaagtgggggcatgggtgatggcagtagtagtggtgggacaaccctgtgggacacaagcagtctgtgccagtgttggctgtgggtgcggtgattgggtggatcagtttccaggtctgcaggtggcttaccagctgtgatgttagtggcaggttgagtgggcctgacttcagacaccaggaagagtgctcagctgctattggtggtggactggctgagcatccgggtacctgatggcaggcttgtgtactgagagggtgacgctgggccagatggacttgtcctcaggcctccctgtggtgcatgtgagtgctggctgtggtaggaagaggtagagtattcctaggctactggtggaatgcttaggtgaggacagtgtggctgtgctgtggaccagctacttgggacagcagtgttgttttcagttgggagcagccacagagaggtggctggggcacatgcagtttgctcatgcctcagcccaaagcagccagcagcagccatagccgcatgcactggaatttgtcctcagggaaccagaaaatgcctggctgctcctctattgggggtgtcaggtcgctgccagtggctcctgctttggcttaggcaacagtggccacagagcaagatgcagtctgggaggggctgggctctcaaaatagtcttgtgctgtggctgcttaggactcagtggtttatagtactcagtgtgaacttactctctggagtaatgccatcacactgtctccaggcagcttcctatgttagatctagagcctacgagaatcaagggactcctgtagctaggattgtgggagtcttcagagggaatgtggactgctggggttctctcacttactcttttcctgcattagggagtctctccaggcttccaggcaatctcagccaaacaggctgccttgcttctgtctccttccttgctttggtgcatcctgtcacttgtttgttaaattctagtgttctctctttgatgatctcttcaaaatgtgattatgtaattcctgcttaggtttctctccatggaagaggagaagaccagaggcatctagtcagacatcttgaagccactccccatgatactgtcttaggaaaacaatcaacatgtagcattcatggataccaaagggaaaatgggtaaacacatttttttttttttagacggaatctcgctctgtcacccaggctggagtgcagtggcgtgatctcggctcactgcaagctctgcctcccgggttcacgccattctcctgcctcagcctcccaagtagctgggactataggcgcctgccaccacacccggctaattttttgtatttttcagtagagacggtgtttcaccgtgttatccaggatggtcttgatctcctggcctcgagatctgcctgcctcggcctcccaaagtgctgggattacaggcgtgagccaccgcacctggccaggtaaacacattttttttcttccaccttttattttaggtttgggaggtacaggtgaaggtttgttacatgggtaaattgtgtgtcattagggttgagtgtacataatatttcatcacccaggtagtgagcttagtacccaataggtagtttattgattctcaccctcctcccaccttccattctcaaataagccctggtggccattgttcccttctttgcatccatgtgtactcattgtttagttcccacttataggtgagaagatgcagtatttggttttctgttcctgcattaattcacttaggataatggtttccagctgcatccatattactgcaaaggacatgatttcattcctttctatgtttgtgtaatatcccgtggtgtatatataccacattttctttatccagttcaccactgatgtgcatctaggttgattccatgttattgtgaaaagtgctgatgaacatatgtgtgcatatgtctttatggtagaatgatttttgttggtttgggtatatacccaataatgagattgctaggtcacatggtggttctaagttctttgagaaatctccaaactgctttccacagaggctgaactaattacattcccaccagcaatgtataagtgttctctgttttccacaaccttaccaacatttgttattttttcactttttaataatagccattctgtctgctatgagatggtatctcattgtggttttgattgcatttctctaatgattagtgatgttgagcatttttttcatatgcttgttggcctcatgtatgtcttcttttgagaagtgtctgtttatgtcctttgcccattttttaagggttggtttgatttttgtttgttgatttgtttaagttccttagagattttgaatattagaactttgttagatgcatagtttgcaaatattttctccttttctgtaggttgtctgttttctctgttgatatatatttttttgccatgcagaagcactttagtttaattatgtcccacttgtcaatttttgtttttgttgcaattgcttttggagacctcatcatgaaatatttaccaacacctatgtcagaatggtatttcctaggttttcttctagagtttttatacttttaggttttaagtttaattctttaatccatattgagttgatttttgtatatggtgaaaggtaggggtccattttcaatcttctgcatatggctagccagttatagcatttattgaatagagaatccattccccattgcttgttattgtcgacttcattgaagatcagatggttgtaggggtgtggctttatatctgggttttctaacctcttccattggtctatgtgtctatttttgtaccagtaccatgctgttttggttactgtagccttgtaatatagtttgaaatcaggtagtgtgatgcttccagctttgttctttttacttacggttgttttggctatttgggttcttttttgattccatatgaattttagaatgtatattttttaattctctgaaagatatcattggtagtttgataggaatagcattggatctataaattgctttaggcagtatggccctttttaaaaattttgtattaattttttttttttttgagacagagtctcactctgtcactcaggctggagtgcagtggcatgatcttggttcactgcaacctccgtctcctgggttcaagtgattctcttgcctcagcctcccaagtagctacgattacaggtgcacaccaccacacccagctaatttttgtatttctagtagagatgaggtttcaccatgttggccaagctagtctcaaactcctgacctcaagtgatccacctgcctcagccttgcaaagtgctgggattacaggcatgagccaccatgcccgcagtatggcccttttaaaaatatttattcttcctatgcatgagcatggaatatttttccatttgtttgtattgtctctgtcttctttgttttgtatttctctatagagatcattcacctccctggttagctgtattcataggtattttatccttttgtggctattgtgaataggattgcattcttgatttggctgtcagcttgacattgttggtgtatagaaatgcttctgatttttgtaccccgaagctttactgatgttgtttaacagttctaaaagcttttgggcagactatggagtattctaggtttaaactcatatcatctgtgaagagagatagtttacttcctctcttcctatatggatgccttttatttccttgcctgattgctgtggctaggatttccagtaccatgttgaataggaatgataataatggacatccttgtcttgtactggttttcaaggtgaatgcttccagcttttgctcattcagtatgatgttggctgtgggtttttcctggcggctcttattattttgtggtatgttcctttgatgcctagtttgttgatgacttttaacatgaagggatgttgaatgttgtcaaaagccttttctacaacaattgagatgatcatgtggtttttttgtttgtagttctgtttatgtgatgaatcacatttattgatttggatatgttgagccaaccttgcatcccaggaataaagcctacttgatcgtggtaagttaggtatttgatgtgctgctggatttgatctgctagtattttgttgaggatttttgcatttactttcatcagggatgttggcctgaagttttctttttttgtcctgtctctttgccagattttggtatcagtgtgatgctggccttatagaatgaggagtccctcctccttgatttttggcatagtttcagtatgattggtaccggctcttgtttgtatgtttggtggaatttgtctgtgaatccatctggtacagggctctttctggttggtaggttttttaaattactgattcaatttaagaacttgttattggtctgttcaggtatttaatttcttcctggttcaatcttaggaggttgtatttttccaagaatttaccatttcttctacgttttctagtttatgtacatagaggtgttcaaaatagtctctgagggtgttttgtatttctgtggggttggtggtaatgtcccctttgtcatctgagattgtgtttatttggatgttctctctctttattaatctagctagttgtctatcaatcttatttattctttcaaaaaaccagctttggttttgttgatcttttgtatggatttttgcatctcaattttattcagttcagctctgattttggttattttttttcttctgctagcttttgggttggtttgctcttgttttttctacatcctctagaggtgatgttactttgttaatttgagatttttctaacattttgatgtaggtgtttaatgctacaaactttcctcttgacattgttctggctgtgtcccagacactctggtatgttgtatctttgttttcactagtttcaaagaatttcttgatttctgccttaattttcagaatgccaaaagtcattcaggattaggttgtttaatttccatgttattgtatagttttaagagatcttcctggtattgatttatattttatgctgtggcctaagagtatggttagtatgattttggttttttgaatttgtttaaaattgctttatggttgagcatgtggtcaatcttagagtatgtgctatgtgcagatgagaagaatgtatatcctgttgttcttgggtgtaatgttatgtagatgtctgttaagtccatttggtcaagtgtcaagtttaggtcatgaatatctttgttagttttctgccttgattatgtgtctaacattgtcaatggggtgttgaagtctcccactatattgtgtggttatttccatctcttcataggtctttaagaacttgtcttatgaatctggatgatccagtgttggatctgaaaagagtaataaaaacattatcattactatcattattatttattgtggttattttatattttgaatgaacttctaagctaaaagatttatcttgaaagattccaactgttggaattcactttgttttaaatagaaataaatgtgtttcaaatgaaagtctgatgatttaatgatcacaaaagtgatgagtttaataaatgagttttttctcacctgctcaatggcactcaatgaaggtttgaaatgcctttttttcctgaaattctttaagtattataccctttgattttctagaaaactttccttagtcggcattccagcttgtgttaaaaaataaagaggaagtccttccttcttaaactggacatatggcaacattttttgtgtgtgatttcatatttgtaggacataaacctgaaaattatattcattaaatttattatgtgaatgaggttactcttctttaaagataaattaactctactgcaagaaaattgtttcatcaattacactgcaatgtaagtaaaatgatacagatgatctttgaattttggaagtatttgatttttttttcctattctgctaaggaagaaagactgactaatgttacagaactttctaatttgccttgtaaatgaagcatgtgttgtgaattttaaatcttttcttccgttggctttgtataagtgtttcccaatttttttttgtggggggtggggggtgcgttaattcttgctctcttctcaccaaagacctttttagacatttttttttgatcatcctccaccacacatatactgtaaatcagtttatgtatcacatatatatctgcactctgtacttaaaaaaggaaaatttttttttaactttcatcaggtatcacccccattgagaatgcttgctttctgttggttttgtttttattgtttttaaagacaaaatcatatagaagaaagagcttaacctctggagtcaaaccagtcggatgttggtttgaatcctgtttttttcacttagtaattattcaacccaagtgattaagtgattaacttaatctctctgagactcagttttctcatttaagagatagagattgtgattcctatgtgaagtatttgaagcttaatgtgattagtgggtatgaaaactccaagcacagtcctaaaagttgaataaatattagcttaaggaagtcactgcatgcaatcactattattttcctaagctggatttctgataatttcatcactccctctggccacaccaaagaataagaacagtcttttattcaggtaatatttacatgttttctctgtggcaagtactgtactgattttttttaatgtattatttcatattcttctcacaacaatcttataatgtagcatttttatcccattttcagctaagataactgtggttttgcaaaatttgtaacttgcctttcacagagctagtaggcaataaatagaggccgatgactagtttctctattaccaggtttttttttttttttttttttttttggatgggggacagggtctcactctgtcacccaggctggtgtgcagtggtgcaatctcggctcacggcaacctctgtttcccaggctcaagtgatcttcccaggtactttaaaagatagaaagatgctcatcctagtgacagaccaagagacaatacaacccaaattggacaattaaggtgccgtgattccctacaagtattgctttattcccctctgttgccaaagtcctatactgagacattcataagtccctcatggggactaatagatcaatttaaagaataataaataagaagtcaggaaatattcagtgaaatatagaaaatattttttctgtatcccctaacaattgtgtacttatttatcctttaaacttgaatatggcatatattacagactagcccaaatctaaatgtactttcaagagtcttgactcttaagtagctatttgaagttaataagatgtggttacaggggtctttatgtcttattacatgcccctatacatgacaaacttaagtcccattataaagtgacatcagttatctgcctgttattcaggtttaagtcagataatataatcatataatctttctgtgatacgtttagtctggaaaaggaagtatgtgaatttcccttattaaaaaaattgaagaaatacagaggtacagaaaatccaacgatgatggcaagacacttaaagggtcctgtggatgtctctctgaggaagcagagttgaatctgcatttacaaaatggaaaatttaagggttactcaagcatactgtttttcaaatcatctacgaaaatctcttcccagggtgccttcacttgtccacaggccctttattctgttacattaagtatgatataagcaagaacaaaacctttccataactttttgttttcatagcacatgcattgcatttccactttgttagctctgcaagttagaccttttgaagtgtctgggtcatcccacatttcttcaaaaaagatgatgtgcatcctctaggtcactccagttcttggaggtaggtagatagaattctaagttgggttctttggcagtgaagatgataccctatatattaatgtagtatctgtctaatgtaaattttgtttgatgaatatcaggtattttattgaaaatatttcaaacagttaaaattatggcctgaatctggggctagaagtgagtttttctatggcaataaactgacttaccctttcttggtctcagttttcttatctggaaacaagatattaagtgcaatttaataaatatttgttaaacactttctactgtttgccatgtactgtgttaataatgagaggtgatcaaatgagataataggtggcaaactgctttgcaatgttttcaacactgcaatacagttctacatgatggggaaccttactaaaatactccttttgtgggggagaaaacctttttctaacattatgttattttcccacctaagagctcttcagtttaatcttaggaacattggaatcataattattatttcattcattatttcatactttcatttttcccaagttgtataaatcttaatgttgattcacctttggttttctgtagataccaagtgaattttgagatcataaacagttgcctttgaacctgaaagttttgtttctaatttgggagataatatgctcttattaatttactgagaagatacgtagaattttgtttttcatatttctgtgttttgccttggttttctgttaaaccatcagcctctacactttcttctagaactatgtatatgtgttgagcattgttctgggaatagccttttacttctgtcatctggatgttctagatcactctgaattttctgtcttgatttagtattcaaataaaaaataagatattgaaagtggtggaattagtgggaactggtgacagaaagggggaaacccaaaattttttaggagctgtgatttatttcatggatagtctctctaagttaatgatacaattctaggggatcagttaaataaacttctaaagtaaaatactgtaaaaacttacctgtggtagaaatagctgttttttaaatcacaattttcacatggcagtgcaattgtacagtgtctctattttgctgatttggagccaaatacactcattagtcacgttagattcagttactattctagtgtcatctgtcatttcctttgtagtaaagaccaatagagttgagtccaaggacactgggcagggttggtgggggtggtggtgggaggggggctgttggtgaggaaagagagaatgaggatggtgagagaaaagggcaaatgggtgcatttgagaagaaagattgtgtaagctataaaaatgatttgatgttgatcaacttatttgaccaattatttgctgttgttcagctcaaaatagtgctttgaatcttaaaagtgaatataatttttgaaatgaaatttaatctaccatagactgaacactaaaaagcatattctgtaggcaaagtaaatatagtttgccctccaatctcagatgataatagtacaggcatatttcctgtgatggagaaatgtctacatatctgttatatctactgtaaactaggtaaatgtccttcccattaaccacatatgttaatgttcaacttccttctgagactcaatttactcatctaaaaaatgaaagtgaactctaagatgctttctagctctaaaataacataattctgtcaccatatttgaatgctcaacgatcaaaacatttaaaatcgagcatgattgggttgaaacacttaagaagcctctcaaacctgtcaaaaaattttatttgagcattgtgatattctaaatatatttcttcctttttctttcgaagaaaacaggacaaataaaacatgcatttgtcaaaaatttgtgacataaggaagccatatacaaaatgcaattaatatctcctatttgtaactcacttcataaccagtatgtatgtcattgtgaaactataatgtaattttaattgctcatgtttctattaactgtgttaccatatcttttccccttcaaggatttcttgctggtactctattaattggtaccctaattctagtcattggactatggaaaatcagagtgagcagaaattctgatgatttttaaaaatttattcctagtttatttccagtaaaatttggtactgtatcagtagatgactctcttagctttatttaaattttggcgtgtctctgtattcatttttgtctgtaattactatcctggattaacagacttcatgtctgttttttctcaatatattcaaaggcgcatttcaaagcaaagtgacttgaagtctcattttgtgatctattaatccactgatttttttccactcagtgtaatttatgatagtatctagtgttgcacagaagcaaagaaatctaggaaaaatcaacctctaacatactgtgaaattgcctgtgattagggctttttctcacttatattaatagatgccagtccagctcaaaacagcacagtggttaaggcagcagacaaatgggggaaatatagtacctacctcatatgattataatcatatatcaaatgagttgccacctgtcaagtgcttagaacattgcttggcacatagtaagcactcagatattaaaacaacaacagcacacacacacatcagtattatttaaaatatctaatctgcattgaatatacataatgttaagtataaatgtcacgattggctctgatgtgtcctgtagacagatgatgatttaaatcgaccctcttctgttttgtagttttaactgttcagaaaactagttgtggaatttatacaaacttgagttatttctaagctgccctaatgcctgtccgtttttcccattaataagaaaactattaatttaatgctgttattaaattgtctgttttaattctttagatgatgtgacctatctcctttttaccctctacaatttttctacttaaattaagaatattacttaagcctattataagttaaagcatgtaaatattctttaactcactaaatgagtcagtcttgtagaaaaatatttgaccattaggtccaggggagtgattaataatttttacaggcatttgtttaatatcaacaaaatattctagctgtcatgatagcaaatatagtaagacataactttttctccagatatatcagaaacgttttaggaatgtgatttagagcctagcaaaaactcacagttagtactaagtcatctaaagtgagttggtatggaagcatcagcaaagctactctgaaaaaaaataaaaccaccaatcttacgtactttcttgtacttgttccaactttccttttgaaatactgttatcagtttatcaagttataaagtatcaatgtatagagtattatcaatttaccaaagctactgctttgagactccctggatcggtgggaatggagactgggcgggggagggcggagggcgggcgggggcagggcagcaagatgtgataagtttaccaggtgctgtctcttggctttcatcagtttctttacatactttggtaaggtgattggctgtgatacttgtatgtcctattaaggacataaagtactggaacatcgaaggagggaatacagtaatttctgcttatcctcggttggggggcagggtgtttcaagaacccccagtgaatgcttgaaacaacagatagtgcctaaccctatatatgctgtgttttttcctgtatgtacatacctatgagataaagtttaatttataaatgaggcacagtaagagattaacaccaacgaataatcaattagaacaatttattgtagcaaaagttatgtgaatggggtctctctctctctcaaaatatcttattgtattgtactcacctattttcagattgcagttgactgtgggtaactgaaaccacagataagcagactaatgtatttgttttgaattgtattttggggttttgcagtgaacttaattgcttattttctgaattagagggaaagtcatgcaaactcctaagaaagaatttgtcttttttatgtgcacataaaaaacactccacttgctttattttggaaacataagctgttgagggtaagagctagctttatatatgtttggctagcctcctgatttcatactgatttaattaaatatttgatcttaattaagacaggatatagttaatgtgcaagtgataatgtggtttcatttaatgattcttcatgtttgcctatcagaggattgatttatttcttttagaagagttaggtctgtatgataaattttagtttagggatggaagtgtaagcagatgcctgacttcgttttttgattgaaatgacagttacataattcaattcaatagtttttttcttctctactattcagctcttataatgcacatgagagcaacaaagtactcaatgttgtgtttgaccatttaagtgtgactggtggtacctcagaaataagactttctggtaaattataaaaggtatatatggtttaataaaattacatttctgtatcttgcaaaatatccattaatacccttggctagggggttcttcatgacttttaaaggataatagaggcttaagtctctgtcactagagttgtttttttctttgttgaatgactaatacattgaatctctcattactatgacatatcgtcagttctggacttggtagcagtaatgcttatcatctcatcctacattttgaactcagtttattgtaacgattagatgctataatgccacaaatattcggggggaaagggatgatacattaggacttttaaagagaatgccttcattatgataatttgcatcatgagatggttgacctaccttgtatttctccttttgcttggtggcttttagagttttcaatgtttaagaaaaattataatatgtgctaagatatccttttataggtcatgtttatagatcttaaaagacatctcatatctttatacaaaattatcacacaaaaataacttggtgtaaatgtatctgtaaaactttctgagtgtcttcatctcttaatcttctcttccacatgtagtagtattcaggggtttttatttatttttatatttttttaacatctcccacacttaggaattcattgacttttaatctgaaggtaccttaattcattctagcttagccactgttcaactcgagaaactaaaaactccacgtcacattttagttgttgctgtagctgataaaccccacctgtagaatcttgtccatattctattactcattattttttttgttttgcaccccaaattaactgattctttttggtgatttatcacatagtaactaaaaatttatatttatcactagtaaataaaatcattttgattttaacttttttttttttttttttttaattttcagggcacacgtgtttcacgttgacaggtttgcttgggacgctagtaaccatgggcttgctgacttagccaaagaagagttaagaagaaaatacacacaagtatacagactgttcctagtttcttagacttatctgcatattggataaaataaatgcaattgtgctcttcatttaggatgctttcattgtctttaagatgtgttaggaatgtcaacagagcaaggagaaaaaaggcagtcctggaatcacattcttagcacacctacacctcttgaaaatagaacaacttgcagaattgagagtgattcctttcctaaaagtgtaagaaagcatagagatttgttcgtatttagaatgggatcacgaggaaaagagaaggaaagtgatttttttccacaagatctgtaatgttatttccacttataaaggaaataaaaaatgaaaaacattatttggatatcaaaagcaaataaaaacccaattcagtctcttctaagcaaaattgctaaagagagatgaaccacattataaagtaatctttggctgtaaggcattttcatctttccttcgggttggcaaaatattttaaaggtaaaacatgctggtgaaccaggggtgttgatggtgataagggaggaatatagaatgaaagactgaatcttcctttgttgcacaaatagagtttggaaaaagcctgtgaaaggtgtcttctttgacttaatgtctttaaaagtatccagagatactacaatattaacataagaaaagattatatattatttctgaatcgagatgtccatagtcaaatttgtaaatcttattcttttgtaatatttatttatatttatttatgacagtgaacattctgattttacatgtaaaacaagaaaagttgaagaagatatgtgaagaaaaatgtatttttcctaaatagaaataaatgatcccattttttggtatcatgtagtatgtgaaatttattcttaaacgtgactactttatttctaaataagaaattccctacctgcttcctacaagcagttcagaatgccatgccttggttgtcctagtgtgaataattttcagctactttaaaattatattgtactttctcaagcatgtcatatcctttcctattagagtatctatattacttgttactgatttacctgaaggcaatctgattaatttctaggtttttaccatattcttgtcatcttgccaattacattttaagtgttagactagactaagatgtactagttgtatagaatataactagatttattatggcaatgtttattttgtcattttgcttcatctgttttgttgttgaagtactttaaatttcatacgttcatggcatttcactgtaaagactttaatgtgtatttcttaaaataaaactttttttcctccttaa

SEQ ID NO: 5 - DNA, 54147 bp, Homo sapiens
cgctcggcgaccagagcctcgcattacttcccctagctccgccaagcctcgctgcatacgcgaccgcgcgcagtccgccgtcgcgcccctatgacgtcacccgcgcgccaccgcttccgggctggggactgggggcggggccgcgcggagggcaagccgggggcggggccggggccagagcagatctccgggcctccgcggccatagctgactgtgccgtcccttcccctcacccgctccacgccctcctgggccgagtggagttgggtggtgtcgggagcctctccctgaggggcaccgcgtcttcaggagctgggcctccagtgcggcgcgatgtcaggcgcggtgacagctctgtgagtccgaggccgcggccgtggcgctgggcggctgcggggcctgaccggtccgctcatggtgccgccacgacgccatcgcggggcaggaaggccaggtaggcaggcagggaagggccccgacatcaccggagcccaaaccgggacggagtgcccaccagcagcaccacctcctgccctcggtggcagcaggagcgccttgaccgaaaccgtgaaggtctctaggggcggagggagcgggagctgacaggggcgccggagccctgcgcccaccgctggcaattgaggaagccgtgcgtgcgccctcgcctcggctccccggggaggcgtcgctgccttaactgtcttccccgctccaaaacagaaggatgatttcttttcccagctgtttcttttaaaatgactggatgttttgatagaggtgggtggaggagcatggagaatccttttcttttaccacttgaagagattggaaaggtgccttcaagacccacagcaaatcacttactctccgataaccaaattccactccagcagatcagggacagaaaagacacttttagaaacagtgtctagacgctgtccccagggatggattcctctggatggagaggtgaatggagttccgtatttgtgaaactcagagaagctattttctggtagttaactgttcttaaatgtgccgtatgttgtatattactccccctccctgcccgccccgtatcgcgtatctctctaagtataatctgaagcgtgcagtggataccatgaaagtactgagaaaggtggcaagtatgtttaacacattttggtccttttcattgatttgctttgagtttgaagatgaagagtaaaaaacgatgtgatgaatcttaccttgagttattcacgttttcatagcataatttcatggttgtttttaggggtgctgagttcttcacctccttttagactgagatctgccaagttttccggcattgctcttgaggatctcagaagggctcttaagacaaggtagattccacgtttatcctctatgtaactttcacactgaacattagctaacaaaagtcaaatgtttctgttatactaatgttctcatttttaatggttgtttttctaaaatcatctctaatgtgatctgtattttctaaaaaacagactgcaaatggtgtgtgtatttgtcatgaaccgaatgaattcccagaacagtggtttcactcagcgcaggcgaatggctcttgggattgttattcttctgcttgttgatgtgatatgggttgcttcctctgaacttacttcggtatgtacctttggtccaggaatgatgttacattacagccacaatgttaactcttaacctgtagtaactctagccgttacaatctcctgctttctaaaagcagtatcttaaatactattgaatttttaaaaaacgttgaattattgccacttgaagttaaaactgaaaggatgatcctttttattgtttcatacagttttcttgtatcttttagggagggttacttagagagactatgcatattttcttacatttgaaagtgtaactcgtggctttttttctaaattcaaattctttctgtaaatattattttctagtgaaataactgtcaggatgcaaaacaatgtcaccatttagtagaaggttcagagtgcttttggacaaatgagtaaaaataatgagttttcatgtataggtcactgttacaatgcccatgagtggttgcatccacatttatgcttgctgactcaaaccttattataagatgcatggtatacctcataattttccttcagttaaattgtatcttgacagtttccttcagttaaattgtgtctttattgatgacctattggtagtaatgtggcattttgaatttgcaagctagtttttctttctacttgtatactttattctgcttggttaatgatccctataaaaagcaacttttattttcagaagtctgcatttcaacttctacgttgcaattttaaggcgaatatacagcaggaaactggcatttataaaatgaacctaattttcaaaagaagcagtttaatactcaggtctcatattgtagctaagtaaatattgacattggcattgtatcctatgagtatataagtttttttttttttttcttttttttttgagatggagtcttgctctgctctgtcgcccaggctggagtgcaatggtgcgatctcggctcactgcaacctccgcctcccgggttcaagggattctcctgccccggccccctgaatagctgggattacaggcacaccccaccacgccaggctaatttttgtatttttagtagagacggggtttcaccatgttggtcagaatggtctcaaactcctgacctcatgatccgcccgcctcggcctcccaaagtgctgggattacagacgtgagccacctcacctggccaagtatataagtttttatgcttttcagaattaatctctggaatctaatagaccatatattttttgctttaaaactcttctctaaccttcttttagatgaacattttgtacttctacctcaaagaaatgtctttgatattgacagggaactaaacctatcttttaaattttattttcatttaaaataaatagtttgtttttatatattagttaataaaatttaggacaaaatagcacctggttaaattatcatttaaccatatctaagcaaagtagaaaggaaaaaacaatttgttgtttgtggtaatcatttcacaatgtatacatatatcgaaacaccatgttgtaaaaaatacatatatttggtgtttgtcagttgtactttgatgaaactggaggaaaaaactcaacttaccttaatttttttaaagtaaaatattttagtaagaggatgttttacaatctcattattcaagaatgtatgtaatgtctctacttcttcaaccagttatgctcattaaactttggagatagggccaggcgcagtggctcacgcctgaaatcccaacactttgggaagatcaggtgggcagatcacctgaagtcaggagttcgagaccagcctggccaacatggtgaaactcagtctctactaaatacaaaaattagctgggtgtggtggtgggtgcctgtaatcccagttactctggaggctgaggcaggagaatcgcttgaacctgggaggcagaggttgcagtgagctgagatcatgccattgcactccagcttgggcaacaagagtgaaactccttagcaaaaaaaaaaaaaaaaaaaaaaaaaaagaaaaacaaactttggagataaagtgtgtatttcaaaaagaaaatcagtctttttattatggttattttctaacatatacaaagtagaatattataatgagtctccatgtattcgttacttagctttagcacttaaccaaatttgccaaccttatcaacctctcctcaaaactttttttcctggagcattttaaagcatattttaaagcatatgtcacatgccatttcacccacgatttctttcctatttactttaaactgaaaaggacttttaattttcttaaacataatcactatgccattaacatagttaacacaattaactgtaattccttaagatcatctgatatccagtctatgttcagttttctccagtccagttttctccggtggtgtcaagcacttttttttcccattaagtttgttaggatctaaatgaagatcacgcattgcatttgtggtatcttttactccttaactgtatcttccctccttttttttaataccataaatttgttggagaaactgggtcatttttcctattggatgtatcacacattctggatttggctgattgtttccttggggtatcatttaacttgttatttttctcttatttcttgtaaagtggtagttaggtgtaaagtcttgatttaggtttagttttcaggaaagaatactttggggtactgagtacttcctgtaacattccagcatgacatacataatgactgcaagtctcactttagatgatgccaatttaagtactataaaattcctcaccaacttttaggtaatagttgaatatccacgtttaagttgtctagataaagtatttcattaggggttgcaaaatggtgatttttttttgagttattccctctgtatttattagctggaattctttaagtctttttaatatggccttattaatcttttttttttttttttgagatgggacagagttttgctcttgtcacccaggctggagtgcaatggcactatctcggctcactgcaatctccgcctcccaggttcaagcaattctcctgcctcagccttctgagtagctgggattataggcacctgccaccacgcccagctaatttttgtatttttagtacagactgggtttcactgtgttggccaggctggtcttgaactcctgacctcaagtgatccacccgccttggccttccaaagtgttgggattacaggcgtgagccactgtgcctgacatcttattaatctttaacattttctttccaccacaagatgccctgggcccatcttgtacattttctgctccatacctggatttggccatttattataggagccattgtttcttttttggggacagagtctcacgctgttgtccagtatggaatggtgcagtggcatgatcttggctcactataacctctgactcctgggttcaagtgattctcctgcctcagcctccagagtacctgggattacaggcaggtgcccccatgtactgcaaatttttgtattttttgtagagacagggtttcgccatgttggccaggctgggcttaaactcctgacttcaagtgatccacccgcctcggcctcccaaagtgctgggattataggtgtgagccactgtgcctggccagagccattgtttcttttagtgtaaaatggcgtggaccaccatttacgtcctagagttgcactttcctcctggattgtcatttttttctatgcctttttagtggatataactaggaattttcttaggatataaaaaattgtgagtttatattcacaatacactaaaaacaaacaaacaaacaaaaaaacagtctcccttgggaaacgtccataaccttgaaatttgtcagtctccttttggtgctccgtggcatcctgaacccgtctcttgttacttggcacatgatgctgtattctcttcatatatatgtctcctctattagatgttaagctccccaagggcaggataacttcccttccttctcttttgtttttctttatgagatagggtctttgctctgttgcccaggctggagtgcagtggcttgaccatggctcactgcagcctcaacctttgtgaactcaggggatcctcccgcttcagcctcccaagtagctgggactgagggtgcacgccaccaccctggctaatttttctattttgctgcagagacggagttttgccatgttgcccaggcaggtcttgaaattctgggctcaagcaatcttcctgtcttggtctccccacgtgctgggattattggcttgggcctccgcgcctggccctgtcttacttttctttagctcctagtgtaggcactgtttcgtggtaggtcccaacgaatggtaaacccaacttcttttagcagctgttgctgctttgtttggtggtgcccttctgtgtgcaaggccgatacagtcttcagaaatggatctaaaatacttttgtaatcgctttgactttttctttccaagtgaacttctgaagagttaaaaatcatgtagtgactttattttggagatgagtaataaggtttaaggtcatctcagagttgtctgtgtaactttttcctctacagtatgtttttacccagtacaacaaaccattcttcagcacctttgcaaaaacatctatgtttgttttgtaccttttgggctttattatttggaagccatggagacaacagtgtacaagaggacttcgcggaaagcatgctgcttttgtaagtttttaattttaactgtctgttaggaagggggtatagatacgttttttcaaagtttaaagatgtattagtttctttaaggacggtcatattttaagttgttcagttaagtgagtgaagatgatataagaaaaccggctcttgtccaaaattttaaatttattcttctaattaagtagtatcagaatagtttgtgagaactcttactccatgacattttctgagttgttaaaaattcttgaattagcccaaatcaattaatgtggcaatgaagatgaaagtaaggaataagaagaatatcaagagtctgtcatttgcagattggatgagtatcctctaattgttaggtggattctggaaacaaaaaaattcaaagttttatgtattaaaatgaaaatatcatatttccagacgtattttagatgtttggctaatcaaattatattctttgattgatgtaatataatataatatgctcattcatagtgttgaaagaaatatgagtttatataatgatatatcttccttatagaagtagaaattttgaattattgagaatgaagaattataaaactttcttatgttaatccttttaaaaaattctttattatgttagaatatatataatgtgaaatacaccattttaactatttttaaatgtatagtagtggcattaagcgcattgactttgctctataaccatcagctccagaatttttcatcatcctagaccgaaagtctgtacacagacttaaaaataaccactattcattcttccctccaaaccctagtaaccactgtattattttctgtctctcttaatctttttctttcgtgtgtattattttttgtgggttaaaatagtattgtttcttgtcttatctaataagtacatcctttttaaaattattaatttatttttagagacagggtctcactttgttgcccaggctggagtgcagtggtttaatcacagtttgctgtaaccttgaatcctgggctcaagcagtctacttgcctcagtctctcaagtagctgagtacgtagccatgcaacaccacaccccactgatttttgtattttttgtagagacagtgtctcactatgttgctcaggctgatctcaaagtctggcctcaggcattccaccgtcttggcctcccaaagtgctggggttacagacctgagccactgcacccagcagtcaggggctttcaataattgttttttaaagctgggcttggtggctcatgcctgtaatcccagcatgctgggaggccgaggcaggcagatctcttgagcctcaggagttcaagacctgcctgggccatagtggctcatgcctcttatcccagcactttgggaggccgagggggcgaatcatgaggtcaggagatcgagaccatccttggccaacatggtgaaaccccgtctctactaaaaatacaaaaattaactgggcatggtggcgcactcctgtagtcccagctgctcgggaggctgaggcaggagagttgcatggacttgggagtcagaggctgcagtgagctgagatcgcaccactgcactccagcctggtgacagtgaaactccgtctcaaaataaataaataaaaaacaattaaaaacaattttttaaatgtaggtgaagcctgcaaatgtatactcatgtacacacacaaatttaacttaccaaaaatatgagtatgtatttttttactttgcaaaagtaatacatatacattgtagaaattatatatacatcataatatcacatgtagggataaattgtatgtgtattagtataggtatattgttgaaaatttagacgctacagagaaacaaaaagaggaaaataaatgctaccattcaaggaataaccactgataatattttgacatatatcctgccattcttttcatgtgtgtattttttattttttacaaaaatggaattgggcctggtgcggtatctcatgcctattattccagcactttaggaagctgaggtgagtggatcacttgaggccaggagtttgagaccagcctggctaacatggtgaaactctgtctcaactaaaaatacaaaaaattagccagtcgtggtggtgcactcctgtaatcccggttagtcgggaggctgaggcatgagaattgcttgaagtcgggaggtgaaggttacagtgagcagagactgaaccactacactccagtctgggtgacagagtgagactgtctcaaaaaaataaaataaaaatgaaaatggaattcttttcaaggttaatccatattgtagtgtttctgtacttcattcattttttgttgctgttgttgagacagagtctcactctcttgtccaggctagagtgcagtggcgcgatctcagctcactgaaacctccacctcctgggttcaagtgattctcctgcctcagcctcctaagtagctgggattacaggtgcccgccaccatgcccggctaatttttgtatttgtagtagagacggggtttcaccatgttggtcaggctggtcttgaactcctgaccccaagcgatccacccctctcggcctcccagagtgctgggattacaggcgtgagccactgcgcccggccaaataatgtcatttttaaagcttgtaattcttattgctaaattactgtctgtaatggttgcattaattcttatctctgttagcagtatataattaaacccttgttaaacactcattaaatctcatgattgaacccttaccaacatcccatcatttgccaactggacaggtgaacaatgatgatagcttgtttaatgtgcatgtttttggttactttttcatatattttttgggaagtagaactcttgtgtgtgttgtctgtgtcttatttttctacattgactccctttttattactgatttgttagggttcttttacagcatgggctctagtgtttgaatcttgttctatcactctccagtttttgatcttgggcaagttttttaacctcttcagactttcagcagagataatgatagactagctgtggatatgaaatgaaatcatatttacatagcattagcgcagtgattcttaaagtgtgatccagaccttgaaattcattcagggtttttttttttttgagacggaatcttgctctgtggcccaggttggagtgcagtggcgtgatctcggctcactgcaacctccacgtcctggttcaagcgattcccctgcctcagcctcctgagtagctggaattacaggcatgcgccactgtgcctagctaatttttgcattttttagtagagatggggtttcaccacgttggccaggctggtctcaaactcctgacctcaagtgatcaacccacctcagcctcccaaactgccgggattacaggtgtgagccaccgtgcttggtctcattcagaggtttttgaggtcaaaattaatttcataataataccaagatgtttcttacctttttttttttttttctttttttgagacgtaatcttgctgcccaggctggagtgcaatggcacaatcttggctcactgcaacctccaccttcagagttaaagtgattctcctgtctcagcctcccgagtagctaagatgacaggcacctgccaacactgctagctaatttttttgtatttttagtagagacagggttttaccatgttggtcaggctagtcttgaactcctgacctcaaatgatccaccagccttggcctgttacttgcctttttaactaacccatccctcttttccctacttatctgaaatgttatagtagtgttccgaaaagggcataagctttggttttagactaacttgggttttaatcctgactgtcaggattaaaaatctctcagcctcaaatttttcatcaataaaatgaagataatacctacctcacaatggtgaatatgtggcattagctgctattattattagtaacagttttagtcttacaggttgattctggatttttgcttctatttatctgagttacgtctgactagtcctacagtataatgtaagtttcattgaattttgtatcttgttatctgtatttagtttgcagatgctgaaggttactttgctgcttgcacaacagatacaactatgaatagttctttggtaagtgcttcttttcttgtcaggaatagagaggtggggttgagccatggtaggaaaaactgaaacaggtttgatggcagcaaagctgtattacaacatagatatggctcaatattgggtgcccatcattaggattgtaatttggtactttttttctccttagggttacctggggcctagaggtaagcaatttagctgcctctgaagagagaggggaagggaaaactggttcaggagtgaaaataataaaggacaatcctttgttactaaccaactttttcacttcatgcacattattattatcatttagaaacaaatatttttgacactgagactatataggcaaattattcgtttgttccacaaattttttacagtgacaaatctgtgttaaacacgttctaggctctgaagatacagctttgttttagtgtgtgagtgtgtgcgtatttgcgaggggacaggtaataagcaagtaaagtaattgacatagtcacttattttaagtatttgtaatctagttggagaggtagtatataaaaatctttttttaagatgatcactcaggcatctctttttttattttttatttttagatttctttttagagacagggttttggtctattgcctctggtggagtacagtggcacaattatggcttattctaactttcaactgctgggcttaagcaatcaccttgtctcagcctcctaaatacaagcatactccaccactaactttttatttttactttttaggaacatggtcttgctatgttgctcagggtggcatctctttaaaatgtatttttaatgatacttgttttctttccaaacatggcattttatctgagaaaaattttagttactctaaaatttaatagcaatttgtgaagcactggcttggtgaccttattcacagcacagtttcttgtttgtctctctgttttttagaactgcgatggcatgcagagtaggttaatagatactatgaagaatttttttttcctgggatcttaagcatcaataaaataatttaatatcatttgtctctatcagtacagagggcaaagttgagatggcagcctgctcttctggctactcttgtactaattcttactattatctgtaagatggatatgtcaaattgctctaggccagatgccgtaatgaaaacttcagtgtaacaaagagattatgtctatttccagacccactgtcccttcatttactgaatttttttttgttgttggtagagctctgtaccaggagttaaaagagaaatcaaagaaataaaaaaaagttctgttaattttgaagaatcagcctagttggagatttgtaccttaaatatagatcatctgaagaacatttgcaaaaacagttgaggaatttataactacctaaaaatatggacctttggagcatggttagacaaacctggctttaattgttttgtctgctacctgattactttatacctcagctttattctctaaaagtataaatattattattattttgagatggagtctcgctctgtcacccaagctggagtgcagtggcgcaatctcagctcactgcacaacctccgtctcctggtttcaagcaatttgcctacctccacctcatgagtagctgggattacaggcacacaccaccacgctcagctaatttttgtattttagtagagatggggtttcaccatgttggccaggctggtctcgaactcccgacctcaagtgatctgcccgcctcagcctcgcctcccaaagttctgggattacaggcctgaaccactgtgccggccatattctataaaattattgtgagtactaatgagaaatatatgtttaactgctctagagttggtactcaatacacagtaagaactggtaagtagtagctattttgtgtaaaggtcttcaagaattttagttttttattgagttttacataataagaggagacaatttagtaaatataaatacatactatatacctggttatcagtttgttatctgccttgcctgttagactgcatgatcactgaggaagagactgcttttattcacccttctatccccaggacttagaacagcgtctgacatagtaggagctcagactcctactatgagcatttgttaaatgaatgaaaaggaatgagagagaatctgttagctgagatggaatctgttagctaagaaagagatatgtttttatgacatttaaatattagatatcataatatgccaatgctgttacattacattgctaaactgtaaactgattcttttctgtcattgtagctgtatggatctgttgagtttccttttttaagtcttgaaaattgctgtttaaacttggtggtgaacaaccacgttttagatggtatttgtgtctacgtactatccatttaaattttaaccactatgttagcttttatatttgttgtttatatttttttctgttacattccagagtgaacctctgtatgtgcctgtgaaattccatgatcttccaagtgaaaaacctgagagcacaaacattgatactgaaaaaagtaagcaaaacttggaaatgggtagaaagtttacctttattcaagccacttcagaacttagtgatgatgtgggttgactgaaacatgtagcagttctgctccatgtggtcttgactcagcctatagtcttctagaagtttgactggattgtgaatctaatatagtataatcatttttgtattatttcaactggaaataatttccaaataccataaatctctatggtttcatcatatatatgtatacacacatacacacatgcatcacacgcttatatataaacaaataatatcctcttaaatatgccctcaaagagcctaatagcaaattataagagttttgctgattctgtgaatttagtaaagaatgccacctttaacataaggtgcagtatttatccttaatttcccttgcaaggaatggacctatagagaattgttctgcgtgcttgcccaagaaactaattctcgtaaattgggtatgcgtgaggaaaaatccaaataaagttttactaggaatactaaaatagtaaatcaaactaaaatcctgaaataggcagttatgtatatacagtacacaattgcagaaaccttgtttgaatattggtctcattttaaaccttttacaacatttttgtagatgaaatcatttttccttttaactcttttaagtgaacaaagttgtctcaggtaatgatatacctctttttggtttactttgactgtcttactctgatcatagatgaacttatacatttatcagtaaattaaaacttgtgacttttgttggagaggaattatttaattatttcatattatgctcttccttttaagcccccaaaaagtctcgtgtgaggttcagtaatatcatggagattcgacagcttccgtcaagtcatgcattggaagcaaagttgtctcgcatgtcatatcctgtgaaagaacaagaatccatactgaaaactgtggggaaacttactgcaactcaagtagcgaaaattagcttttttttttgctttgtggtaggtcttttatgatatgtttgcatatgatgtttgaaacttgaattttaagactgtatacataccaacaatataggattgaagtgtgagacaattaggttgtttaatcatgactttaaactctgctatttgataccggtaggaagttagggtatcaaaattaataaatgcttgatatacctcaaagagttagaattcattaagtcctataacacttcagctatttacatatatacacaaacttacaaacacacacaggttgggaagttcttcagaatttagcattgcctcatgctcaaaattatgaatagagttattttacactgtgatatatgtatatacaaaggctagtaaatatccagataagagtttactgtatgcattgatttttttcaaataagtgttttgcagttttatattcatataaatgaggttaagtattattttgtcaagtactcagtatatttctacagaatttctggttgtattatttatagtttctttttaaagatagaaactgaaaactgtgcttaagatttcacatagaataatgatggagtaaataaagtattgttattttgggctaagctgggattagagacttgtctgagttagaactctaacatgtagaatttaaaaaatgaatttctgtgatattttatgtgtacatcattggaagtagcctaatccaaggttttttaaatatgagcctttaagattcaaatttgtactgagcatcttaaacccctaaacaatgaaatgctaatgtcaatgttattagcctgattataaaatttttttaatgtcatgattttgcctttcatactcattaaaatagcccatttttctccattccctggctctactaataacactattctttatagcagatttaaagatatgtgcagataatagcctttttaagaattaatttttgaaattataataaagtatacataaaatataccatttcgatctttttttttttttttaatggagtttcgctcttgttgcccaggctggagtgcaatggcgcgatctcagctcaccacaacctctgcctcctgggttcaagcaattctcctgcctcagccccacgagtagctgggattacaggcatgcgccaccacacccagctaattttgtatttttagtagagacaggatttctccatgttggtcatgctggtctcgaacttctgacctcaggtgattccccctgcctcagcctgccaaagtgttgggattacaggcatgagccactgctcctggccctgatcatttttaagtgtacagtaagtggcataaagtacattcacattgttgcacaaccatcaccccatccatccacagagttttttcatcttataaaactgaaagtatccgttaaacaatagctcctctttcccaccacccccagcccctggcaaccactattctgtttctgtttctatggatttgactactcataagtacctcatgttgagtggaatcatacagcatttgtctttttgagactggtttatttcacttagcataatgtcctccaggttcatccaggttgtaacttgtgtcagaatttcctttcttttgaaggcagaataatatttcattgtacagatataccatcttttgtttattcattattctgtcaatagatgcttgggtcactttgaccataaatggtctttaaaaaatagcaacttaaaatacattgtgaaagcagagagctaacagataatttcagttttataagatgaaaaaatctggccaggctgggtggctcacgcccgtagtcccagcactttgggaggctgaggtgggtggatcacgaggtgaagagattgagaccatcctggccaatgtggtgaaaccccatctctactaaaaatacaaaaattagctgggcatggtggtgtgcacctgtagtctcagctactcaggaggctgaggcaggagaatcgcttgaacccaggaggtggaggttgcagtgagccgatacggcgccaccgtactccagcctgggcgactgagcgagggtctgtctcaaaaaaaaagaaaaagaaaaaaatcctgtggatggatggggtgatggttgcataacagtgtgaatgtactttatgccattaactgtacacttaaaaatgatccaaatggtatattttatgtatattgtaatttcaaaaaataatttttaaaaacactattatctgcacatacctttaaatctgctataaagactagtgttattacataacaatttacatagtacatttctctcagagttttacgttaggaaaacgtttgctttttccaaggaagagagatagttccttttaacagacaataagctgtgtaactcaggggttttcctattgcctccctgcctttctgcctacggatgagttgtgtgctcacctgaagtagctttcttcctttaaactgaagtttctgatacaatcatcacgttccacagccagctcccactccattacccatttaatctggctcttatctttttactcttgttttaatttttaccgtattacaattggtccttgaacaacatgggtctgtattgcacaggtatgcttacacacagattttcatctatctctgccacacctaaaacagcaagaccaatcccttctcttccccagccttcttacacaacatgaggatgacgaggatgaagacctttctgtgatgattcatttccacttaatgagtcgtaaatatattctttcttatgattttcttaatagcatttctttagcttactttattgtaagcatatagtatacaatacatacaacatacaaaatacctgttaatcattacttatgttattagtagggtttccagtcacctgtagtctatcagtagttacgttttgggggagtcaagagttatagcagattttttattgcctgagggtttgtcccctaatctccatgttgttcaagggtcaactatagatgcttttattacacatctcctttgaaaactgggtagcatataattaatacattttagtcctgcctgacactcatttaaaacaagcaaacagagatcccaactaataacatgaatatgtgagactttaaactatttttattacatacgtaattatcatactacaaatcccaaagattttcttttgatttacatagcagaatattattaatcaagttatcactaaaataaaggcatttctttgggaagtcagaggaatatagtccagacatacagttggcccaccaaatccttgagttctccctccttggatccaaccaactgcagatcaaaaataatgaaggtgaaaaaatagaagaatagcaatacaacgataaaaataatagagattgaaaaacaatagcacaacaactatttacattgttttaggtacaagtaatctagagatgatttaacgtatatgggaggatgtgtgtaggttgtatccaaatgctatgccattttatataagggacttgagcatctttggattttgatacctttggggttgggatcctgaacccaatcccctgcagatactgagagaaaactagctttttggaaacctagcttaatagaatgataagctttagataaggttaagagcagtgctgttcaatagaaatataacatgagcctcaaatgcaggccacaaacatagttttaaattatctagtagatacatttaaaaaaggaaaaggaaacagatgttatcaatttcaatattatatttgtatttagcccactatatgtaaaaatattatttcaacatattattgatgtaaaaattattgatgagatagtttacattcttttttggtactaaaatcttctaaacccagtatgcattatacttaaagcacttttcaattcagaccagccaatttcaattgctcagtagccatgtgtggctagtgtctaatgtactggacagtgtagatcaaaaggagttaatgattactgtatttgccagtcttctttgaatatcttttgtcttactaggttgttttttttttttctgtaaaatgtaatttaggtgatactggctttatcaagaatatctcttactacatatccaaagtaaatgaaatcagtatctcaaagagacatctgtacctccatgtttattttacagtgttcatcatagacaagatacgggaacaacctgagtgtctatcgatggatgaatatatatatagtacattttcatggctgaacataatgtaatattattcagctctaaaaagaaggaaatccgccatttgcaacaacatggacaaacctgaaagacattatgctaaatgaaataagccaggcatagaatgtcaaatactcacaaatatgatctcacttatgtatgtagaatctaaaaaagaaggaaagagtagaatggtggttgccagagagtagaatggtagggaaatggggacgtgttggtcaaagagtacataatttcaattataagatgaataagttctgggaactaatgtatatggagacttcagataacagtactatattctttacttgtaatttgataagagcagattcttaagtgtgttcatcacatatacacacagaaaaatggtaactatggatgatgatggatgtgctcattaatttgactatggtaatcagtagacaatgtcatgtgtatattaaatcatgttatataccttgaacatacactatttttatcaaatattaacattttatgacaatttaaaaatgaattactaatgaaattatgaaatatattaattatttgctataattattcataaatggttatcctcaactctgaaataatgaagggagacgttgtatggacaatttctattggaggatggttgagatgggtcttctttggtgatgagggtgctgtggaaacaagagccagagaatggagtttggggagaggtagagaatgggaaggttattctggaaagaattcacagctaatgaaggattcttgggacctttgaatgcttcttatctaagtgatctgtttttatttatttaccttgcattagcatggaccagtgaggttgtttggaaaatgagcacaatatttaagtataaaaatagtaagagaagtgggtcaagaaagctaataatcactctgtgagcattatctgttcatggagaaaatctttgacagataagattaagggtcgaatcttcttttctagcacttcatcggcatgcagattgtggcttctcttgccatatatgtttgatattgcccatcaattgttaactcattttatctagataggcatgtgaaattatctaggaaatcaaaggattgcagatggaatcagaaccacgttgccacagtttcattctggctttagccttgagtacagtatggactgaatggagactactaggctctcagccatctgctgtgttctggtagtgctctacaatcatgtgtctctactacttctttgcaatgtaaatactagtgtaaaactactcagccacaagctctgagagagatcgagagatgttcttctcttaatagaaataagtcatttggtggaataactcttcgagtcaaccagtgtaagtaacagagacaccaaaaactagccattagtttagtttgcttgacccagcaatctacctcttagtatatgctttggtgacactcatgtacttatgcaccaggtggcaggtgtgtactagaattaagatattcatagtagcattgtttcagatagtaaaaaagtgttatccacaaaaaaatggatgaattatcagtgaaaattactgaactttggacacacacacatcctgccaaccttcatcaaaaaaagcattatttcttattctccatcctaacctagataagtggaagagaagaaagaattttttaaaaaaagtcctgatagctggaaaacttccttcactgtatccaaagttatgagaactctttgggttgtgtttccaaactgagattcagaaaagcaatcacaattaatcaataaattatcattttcataggacatttctaaatttccaaagtgaatatagccttttttcaatccagctagctagctaggtccatccatatccatgcacatcatctggtttaatagatttctcattatgctgtattcatctgtatatattctaatgttggagaattttctcaaatttaaatatgatttagataaacttaacagagtgtcagcagtacttagataaagcgatttttttattttttgagaaatggtctctctgtcacctaggctgaagtgcagtgaggcagttatgcctcactgcagcctcaacctcccaggctcaagtaatcttcccacctcagcctcctgagtagctgggattacaggtgtgcactaccacgcctggctaatttttgtattttttttttttgtagaaatggggtttcactgtgttgcccaggctggtctttctgggctcaagcaatccacccacctcagcctcccaaagtgctgggattacaggcatgagccactacgcgcagcctagataaagcaaatttttaaattgatttgatacttgattttactcattaaaaaaaaaaacctgaatgctaattgttaaccaactattgttaaattttaagggaaattgggtagcatggtcttaggtctgattataaatgtttgtcttttttgggagcctgtgattttttcaatacaaagcagcttttaaaacatcttgtgagaacggtatttaggaggagaacaaaaaagggaattctgaattgtaatgacagatgtaaacatgtctttcattagggttcactttggttttctttttctttagtggtttttggcaaatttgtcatatcaagaagcactttcagacacacaagttgctatagttaatattttatcttcaacttccggtaagaaatttgtctttaaaaatctgcattataaatcagtgtatgtatttctggtatatatgtgtgtacatgtacaacatttttatcttgttatagcttcttacattagttctaatatacattagtctattacaactgccttttaatctgtatacagtcaggtgctgcatatgatgtttcagtctacaacagactgcatatatgatggtggtcccataagattataatactgtatttttactgtaccttttctatgtttaaatatgtttggatacacaaatacttaccattgtgttacagttgcctacagtattcaatacagtagcatgccatataagttggtagcctacaagcaataggcttatagcatatagcctagctgtgtagtaggctataccatttaggtttgtgtgagtatgctctatgatggtggcacaaggatgacattgcctaacgacacacattttctctgtatttatccctgttgttaagcatgactgtagtttcatgccttagcctgtgctatttatgttccttcaaatactttacaatattttttatataacaacatattacagttttataggctggccttttgtattgtagttgcctttcccttcacacatcctttccagagatctttttctagaccctttggctaaaatgtaattgcttatttcagaactataatttgccctatgataggtgttttatttttaagattgaatcacctttcaaatctggaagacaaaagtatttttaaagctataaaaataactttagggacacaggcttgattatgatgaagtcagcatgttactctgaataagatttaagtttcctattagtttaaaataaataggactgtacttgatctgtactgttgaaataaacatggtttagtttggaggctattttatgcatgaactttaaacatttcagtctagtcattacttaactgcagtcattttcttagttaagagtgacaaaaataatttgaaaggtaggtatataatttgcttatttaaacaatgaagttggtagtaaaaatgttgacagtatttaaactcatgtaccatttttaaattcttttctcctcataggactttttaccttaatccttgctgcagtatttccaagtaacagtggagatagatttaccctttctaaactattagctgtaattttaaggtaagcatatagtgtgatagctagtttgctctgcttaaaaatacaatattacaatttctgatagtggcaccagggtagtttgtattgtaagagcaaagaaagatgtggataaaagaaggctttaagtggacatgatgctacttagccctgtcacatcctgcactaggtttctaaaccttcctgggtagggtaaccagagggaaaaccccaaggctgctttggttcccattcatgtgtctgcagactcatcaagtattggactgacgttcacacttaatgtagcagcttaatcctcataatctcccaagtttctatttctttttcttaaggcaatttcccctctttgttttgatttttatttctcctttttctacttctcttagaaagctaacattcagttttctctaattgtctaagcctcaggtgatgtttcagttattttctgtataattcatttggcagttttgcactactgcataatatgagtgttgctgataactatacttaaatattttaatttaactttatgtatgtttgttttgtcttccatactggtttgtaaacccttgaaggccatagccttgttttatatttgtgtcatcaaagacctagcatagggctttgcccatagacagtattgaaaaaagatgtgttggtttaataaaacttattttatgaaacaaaatcagagaaggtagcaggatgatttgatggagagtagtgtttcttggttatcaaagctgagattgaataagagctctgctgtttgccctggggcagttttcttaaactctgaaagggtttcctagttgagaaaatgatattatctattttaccttgcagccttgttttaaagtttagtggtaatagctatgaagtgtctggtattgggcaatcatagaaaactggtagctcttaatattaaatgtttttcttttttagttataagggtaaattaaccacggttgctccaatgggcagctggttgatccaactaatttaccatttagactttatggccactagggatttattcttttacatgatttactaatgttttaagccgagcaaatttttgcattagggaaatatgtttgtattggagaagtaaatgaggttttatttaactttatttaaaatatgtgctaatttataacttttcttcatgttatcttaataaagacttgataaagaaggaaatggatataaaatattgaacttgtaagtattttgacagagtacattacttcttctcattaaagtaggtagacgaacagaggttggcaaactatgttgggtcagctgctggttttgtaaataagattgtattagaacacagccactctcatctatttacaaattgtctatggccattttagcactgcagaggcagagctgaattgcaataccatgtggcccagaagcctaaaatatttactatctgtacctttaaaaaaaagtgttacttagaaattttttgagtaagtatatgttcttaagaattatgtattaaacattgtttaatattttgttttgaattggcattttactaagagattcaatttctgaggctataaaaagaattttacataacaacaatcttgaagggaatctaagcaaagaaatctcatttcatcaattgagagacaagagtgtggcctcaagccaaacaacttggaatccaatcccatctccatcattactagttttgagatcttgaacaagttccttacatttctgtgccaattttctcgtctgtatattggggataataataggatttctctcataggattattatgaggattaaatgagtagaagttgtaaagtgcttggaacaatgtctgatacacaacaggaggtgctcactatatttagccattatcataatcatcatcatttaaatggaaacaaaatccctggtttctaataaattgtggatactcaataaataatagctgaatctgaatatgaacagtgattattacagaaaattgggatgatttaattgaagggtttgcatatttagtgtaaggactgcacttgagttctgatgacatctttccataagggaatacatattttctttcatcttcctctcccactgccacactggtctttctcatcagggtgagagaattaggctaatttttttttttaattagcaatatctcatctacttgaaaacgtgttacaatttataagattcatagaaatagacaatgcaaagagttccctgaggacaggaaccacatctgtattgttcacttctgtaacccagtgctttgcccatattagatgcccagaaaataacaattgagtttatgaatgacctctgatatctctacatccttaattcagtcttatttttatccactaaaatcatgagattagtgaaattgtttaagcacgtaaggatagttttactgttaatttagattttaccaataagcaagagtagtactattgctggatttatatgggtttgatataattttataatccaaaagaaagattggaaagggatgacaagttggttaattcattcttaactgaaagatagtggatagcatagcacataaaagcactggactctggagtaaaactgcctgtatttcagtctcggctatgtgatcttggtcaagttaccttacctctttgtgtattagctttcacatgtaaaatgggaatggcagtaataacacttccttataaggtataatattgtacattttgtgaggattaaatgagttaatacaaatataacactatattattatattgatgttgttagatgttattattgaaattgctaaattatttgatagttttacccaaagttgagattagtcttgatcacttataaataatttttatcttcatgattaggcttttcagaattctttagctcatcattaatgactgttattctcatagcattggaggcgttgtactggtaaacctggcagggtctgaaaaacctgctggaagagacacagtaggtaagtactggactctggattctctctgttagagtaaataagaaagttacatgtgcgtgctcatgtgcacagatgaacgcacaaagggtaggcactagcagggtgggttttttttgaacttttcctttggaaataacataaaaaaatgcgtaaatagtttagtgaattctcatagccttcacccagatttttcaaatgttaacaacttacataaatattatacagttataaaaatcagaaattaacgttgattatgatactgttatctataaagccttttcaaattttgccactttttccactaatgttctttttctgatctaggatcatttattgcatttaattgtcgtgtttccttagtttcctttaaatgcagaagtgttcctcagtcttcttgtcttttatgaccttgacacttttgtagggtaccacctagttggtttgtagaatgttcctcaatttgcatttgtctgacattttctttggttaaattgaggttgtgcatttttggtaagaatataatggaagtgatattgtttcctgatcagtgcattctaccaaaaggcacatgatattgatttgtcctgttgctggtaatgttaattttaaggtggttaaaattaaccaccctactccagtgtaaagttactaatatttcccactgtaagtaataagcatcttgtgggggatactttgaggctatacaaatttcctgttgctgtcatatcttcacccacgaatattgccatttactcttgattcttgattcatagttactgctatggtgaacacttagattttgatccattgcttagacttaacaaaaacaaaagtaatcagaacctagctgggctgagcatggtgactcatgcctgttatcccagtgctttgggaggccaaggtgggaggatcgcttgaggccaggagttcaataccagcctgggcagcatagtgagacctcataataaaaaataaacctagattaattatttctctttgaatacttctttagatatttgaggtttattgaatagaacaatgctttctaaattgttcctagctactacccagtgagctgtgctttgaacctcctcacctctttctcacccagagcagctttgtgtatataaaacaatatatgtatttggtatgtgcatgtgtatgcaagattttgttgacaggcttttccttagctttaaaaaaagtttgaaaataataaaaaaaatttaataaaacattcgtcttttgaataattgattaaagtattgaatatgaccacttggcagaacattatttagctgttttgaaaagtttaaatggttttgagagttaataaagagaatcagtatttattattcatgtactgtgagatctgtattatgttagctgttttggaacattaaaaagtataaattatgtgtttgcagttttcaaggagttcttgatttggaacaatatgagatttataaaatgaagctactagggattaaactaataccacacttgacaatagtaagtattgtctaaaacagaagacaggacagaaatacagccgattagaaagaggatgctttgtggaagaaatggaactttaacagagcctttaagatgggagtggtagtgcaatacatattaagaatgatatatgggggtaaggaagacaatacaagcaacagcttagtgatggaaaaaaaatttgttaagttggaaaatgccaggtgtcaagattgtttaggtagggtaaaataagaaacatgcatttctaaattaaaaacaaagtgttactttggagttgtattattataatatgtataggttttggtcgaatcattgaggtgaatgcttttgcatttatttgttaacacattaaactccttcctgtactcctagaagacttggatggggtaggctataccttttcattatatatctttatatcaatataaaggtgatttatatcattatatatcttttcacttttgtatattcttgcaatattatctgacacattattggattttaagcgtatattgaatgagctaatgagtgattgctttaaatcatgtccatttttacaggttccatttggtctcttgctggagccatgctctatgctgtctatattgttatgattaagagaaaagtagatagagaagacaagttggatattccaatgttctttggtaagaatatatgtaacttgggaggctatttactctaaatgattaacacagggttttgcttttgtttttcagagggaatagggaagcctttttttttcttccgtatgattctttaaaaccatttaaagattatgaaggccagtcccaatgttttccttactttatcctgcatagttgtgcacctatgagggagtgcccatctcctcagtgtgagacagaaagaaactcctaacacttttttcaaattgatgtcttcagactgcaagtcagatatttatctcactgataggacagatttatgctcttacaagcatgtgagagtttacctgctgtattttacattttgccatttttgaatagttagcaaaggactggggagactgcccccgaattatatgtttaatgctgtcgcagtctatgtacttatgtacattaaaaattgtgggccatttaaatgcttttcatttgcattttatctttaagacacagacacttttataacatagattcattctcaaattacccaattatagtttctggatatggtttataaattttcctttgcctgacatcagttcaggaaagaacttgcgatatctgtaggactggagaagaacacattgacaagataatctttcaaaagatatctgaatataaatagataaagaagctccatgataagagttcaaagtgcagcttacaaggagtcaggagacctggaatccagctgttgtaactttatttatctcataggcatctgaaatatgaggaaattggactagatgaatggcctctaaactgtgatttagggaataggtaggcttctgggatggttggaaggaaatacagttgcatgcaggggtctagttcttggactcctttgctgcttcacctgtggaacagctctactttgttgagcattttgcattagaatttaatttatagtaaagatttttcttatggctgggcattgtggctcacgcctgtgatcccagcactttgagaggctgaggcaggaggactgcttgaagccagggattcaagatcagcctgggcaacatagggagactgcatttctatttaattttttttaaaaaaagactattttaaaactattttaaaactaaaaatagattaaatacttgtacctaaagactaacaaaaataaaatgtttgaaaagccatgaggctgaatgattgcttaaattctttttaaatatagaattcaagaaatatagcataatagccaggtttggttacatgtgtttgtaatcccagctgcatgagaggctgaggcaggagaatcacttgagtccaggagttcgagtctgcagtgagctatgattgtgtctctgcactctagcctgggtaacagagtaagatgctgtctcttaaaaaagaaaagataattttaatgatattttatttgagagtcatagaaaattttatttggaatggaataaaatgctagttttttttagtgttataggtaggtggttgggtcagtggtactttttaaaaatttatacattgacaacttgcaagaaaaattgcttaatttactcatattagggagagtgcatatagacatgtggcttgtgttggtcctgttcatatgtgatgtgatatgtaaagcaatattgatctgccctgggctttagaatagacaggattcggagaagttaggattgggatgttgggggctcttcaggcaagggagtgtgagcagaggcttaacagggagcagtgagtagatctgaatgattgtgctggaacttcgctttgtggaagaagaacagaaaggcatgtggcgccagattctgggcagtcgagggaataggtggggtcattgggacttttgtctctaggtcaaaggatgttaatttacgtgggatttcatagactcagcacttcagggactagaaaatagatttagatcttggtaatgccacgttttggtgtttcattaaaacaactttgtaatgttatttaagcattttaggtcgtgtccttgctgtatatgtgttcttttgttgttgtttttttaatcaatagatgtaagttggtgtattagtctgttttcacactgctataaagaactacctgagactgggtaatttataaacaaaagaggtttaattgactcacagttctgcatggctggggaggcctcaggaaacttacaatcatgacgtaaggtgaaggggaagcaaggcatgttttacacactggcaagagagagagaacttgagaagggggaactgccaaacactttaaaaccatcaaatcttgtaagaactcactatgatgggaacagcatgggggaaaccacccacatgatccagtcacttcccaccaggtccctccctgacacgtggggattacaagtcaagatgagatttgggtggggacacagagccaaaccataatagttgggctccctaaaacaggatatgagatggggaatttgtgtgggtgattttttgtggggagttcactgaaggaaaaacttgcagtgaaggaagcaagatagagaaggggaaagaaccgtgtggcgcacaagtataactgaggtttggcccaattcattgcaggtactgaggcggggagcagagggagagcagctaatatgtctgggccttgagtcgtgatggctggcctcgtaaagcctccatcaattagtcatgagctgcagaagatggggtggagtggagggtgggaacttgctgggaaaggcagacttatttgccccccttcacagaagtggggtggctgtgagtctttagcatcagacagagagtgggtgctcctgccctgttaagatttaactaggcatcctaatgactggtttattatttaggtgacatagtaagtatcaattatatatctactgtaatttaattttcttttaagaaagctatatagttacataaatcatatagcaaatttgtgacataaactgtataggaagtacaacaaaatttattatagaattgtaatcttttttctttatattctttacttttacatgtatatagtcatatataaacttaatttctataataatattagctaacttttattaagtgcttaccatgtgccagatactatgctatattttatgtgttttgtctaatcttcccagcaacctaattaaatattattaaatgttattttatgcttatagattggaaaactgaggcttaaagaggtataaggcttgcactactattgagtgatatatagagctgggattggacccaggcagtcagatggccgagcacacacttaaccactagtcagtctgtactttgctcatacgttgaatagctctttgtgtgtacatactttctcactaactagttagaggtctgggaatgcaggaaccaagagttttatctcctttggaaccttcttccattattgctcgcaaagcacaagtgttttggacataaataattgaatcagagagcaaaccatctaattcctcaaaattaatttaggctgagtacacaaacacatacataccagttatttcttttaagttctagggcactatattatcagtagctaaggttaacaacccttcttgttgagttgtcctaagtggtttattccatagtagttgctcccatacaatgtgggtagttgaactgagtgatcaccagttgcttcagacagtttttttttctatggcgttgagctattcacaggactgacttaaaaacaaaccaacagaagttttagctaaggaaacctcccagagtgcttttgtgcaaaatctaattttgattttagagttaataagcttggaaaatagaaataaatcaattttaactcttgtctcttttatacatgttcaggttttgtaggtttgtttaatctgctgctcttatggccaggtttctttttacttcattatactggatttgaggacttcgagtttcccaataaagtagtattaatgtgcattatcattaatggccttattggaacagtactctcagagttcctgtggttgtggtatgtactgtttattctccaattattatcagttgattaatttttggatattttaagcatttatatttgtctgtttgctggtggcccttcctgtgcaccccattctgcaacacacatacaactgaatactttaactccactagagcagggactttgttttttaacttctgtgtgcccattctagagtagtaccttgtccacagaaggagctcaataaatacttgttgaatgaaagaatgaatatgaatggtctaaatctgtaaaaatgttttagaaagtggagtgttatgcaaatgaaagtagtcattatctaatggatatccaaacatatgaggtatgtatgccaagtatgagtgcatgagttctagttgagaatccaggagatgctgcttatttaagaggctttggaatatctgtttgcttgttcataggtgtttttgttttatttattttcagaacctttcatatgggtgagccagatatgtaaaccttaaactctgattgatttgagatgttaacatactttgatatgctgtatatccaatatactgatatgcgataataaacttaaaatagtatgaagacagtatcatgtatggagtttgagagacctttcaaataacagagctttatacttagtcctatttttatttaatagaaacttgaaatgaatagaatgaataaaacctaagtgaataaaatgagttttattacatacccattgaaactgctaactagttttcccttgcaaaagactgcaacagaaatagacttttttgtggagtcttccttaatgctctgcctacagtgctgtctccctgcccagttaagaaatacctattttcttggtatcccccatatcactctcttttgtgtaatacttaaagatttactttgtattgtagtaatttatgttcttatctaaactcctttgctgatctaaaattctttaaaatcataatccatttgctcattaattttttcatctttagttatgtacattttagatactcgatttttttaaccttaactattaacagatgacaaaaggctttagcctttagctaaattggatccaccttaacagctggattaagtcaaacaggctttataattctacctcccaggttttttattatagtactctgcatgataaacatccaagaacatatgctgtatttgaccccgaatgctcttttcacagagcagctaagtagtgggaaccacaagtacttgtttcctttacctcatcaataaggactcgttgttcagcctctgttcattacttctagtgacactttattgagagatagccccttttattgcaggacagcactattaattctgacatatactgagctagattttacttgcctataacttccatggatctgtagtcctaacaatatacattatggttttatcttggcttataattcattttctccttatatgcccaaattatcagtctttataaatggctcatctgtctccattgggtataatattttctttcaattcaacaaaattgtatgcagatagatatttcaaaatttcatacccacattgttaattcaaggtgaaaataaagagcttacttagcttttggttaggacaattgttagaaaaatggaaaacaacaagaaaatattttttaagaatattcaagtctttctttttttatgccaagccaaatcaaaagagtaacacatgattttagtgttcatgaaggtgagatatttttgcttggtgacagaatcacatgttggcttatcacttccttaaagtctatgtgtgaagtattgtcctgcaatgttaataatgctgttttctttgttatctacaaatcatcacaaaacggtaataactgttcaacagttttttaaaaaaattaatgaaatataagctatacacccaaagttgaataagatctgcaaacagctcttgaaaatagcataaaatattttgagctttttatacttatatatttgtatttttaatatttgaagaaaaactgagaatcatcttaataactttattatattttatgtttcaatccatcctagcctcttatctttgctcctgatctcacaggcctatattataggatagaaagtctttgttcagtgtttttctttggtttaattttttaaatatagaaatgtatattttcttttttttaggggctgctttcttacctcatcattgataggcacacttgcactaagccttacaatacctctgtccataatagctgacatgtgtatgcaaaaggtaaggaaactatttattattcatagatattttaggtgtgttattaaaacaaacctaatgaaagttgagatgtgattaaattataaggatacaaacataaataatacttgatgctttctctcccaaggtgctttactacatagaaatatagaaagtaccgaagaaatagataatttccatttttagcttttccatttttttccctaaatttctaagttaagggcatcatcttcatatgtagttctccagtttttgagctgattctgttccagatgttctttggtaagtcacattttatcatacaagcattttagtttctgcgataaaccctatcacaggctccttaacactgtgctgaatgagcagcacaggaatcatgctgtttgcagtaaaagttagccatctctctctggactcagcagagtgggtatcccatcccttttctctgaaggcctagtatggatgtggggattcttgtgataaatattggcaatgctaacaccgcagaaaagagaatctgggatgtttctgccagcagcctagaagggaagagtttattcagtgctcttgggtgaagcaggaagaacagaggtatgctgttgcccagcactgaaagatggagcatagccatttatcacacagttcagtatatgtaggcatttaacttttaactgcaactactaagtcacagaagtatgtgtgtgtgtgtgtgtgtatgtatgtgtgttttagtctaatataatttgaagagggaaatacttcaaggcccaaaggcttataatgtgtacaagcaataatcaaaattttaaacctatttttctctaggtcttagccaggcacagtggctcacgcctgtaatcccagcacttgggaggccgaggcaggcagatcacttgaggttaggagttcgagaccagcctggccagcatggtgaaaccccgtctctactaaaaatacaaaaattagctgggtgtgatggcgtgcacctgtaatcccagctacttgggaggctgaggcaggagaatcacttgaacccgggaggcggaggttgcagtgagccaagatcatgccactgcgctccagcctgggcaacagaacaagactccatctcaaaaaaaaaaaaaaaaaaaaagataaaagcaaaatatgcttagtgctctatatcctctttatttataaaataattctttactgatatttaactttgttttatggtcagtaaattcttatttgtcatggttaaagaactgagattctttccttaattgagaattaattatcttacataacttgcattttcaaagaatgtggatattccatataacactaacattgcacattattacacatcattcttttatagatttaagtaatatctaggcccttcttcatcttcaggtcataatcctgaatatgaaccaaactggttgtgaaactgggaaggtgctacttgttagaggattttggtagactactgtgtaaatcatctttattgtactgatattttaaaaacaaaagctttcgtagattgaaaaaaattgcagcttaatgttcaggaatttttaagaaaatagtcacaggggacctaattgtattaaatgattagtcatttcataattatcattacaaacaataatggttataatttgtttaataaagtattttagggtaaagacaaaacggggaaatgtatgcacatgcaattaattataaaaacataaccaaactttaactgattgcccagttctggatatgaagacaatcaagaaaagatttggtgttcttgattgtcttcatatctagaactgggcagtcagttaaaggagcaggctgtgtgttggtgtcaggattgaggttagggagattccatctggaaaaagcagcagtgtgtgtccagaactgtaacacaaacataagagaaatctacttttatagggtttttaggtttaattagctaactgtatttatatatagcttctgaaatgttagcatttattaacattgtgcttgaaacaaattggttatttaaatctatttataatcattttatataatagaaagcatccttgatcatattctatttgatattcagatatatttaggaattagaaaaaaaaattttgtttacataggtaattttctttgttgtaataaatggcttcgtttcttttgtcttagcttgttggaaatcaaattagaagttttttattatgagacaacatataaacagctacattgtggaaagtgaacttgccttctaaagtcttctagggctttatctatctttattaagtttgctttgattcagttatgaaataaggtttttagttgaatattcatgaaataattctatcaactatatctacatttttaatcgcattatttataacttcttaataccttttctgatcttggataatttaaatgcagcatggtttttcctgattattagtcattctggcaaatattccaggaatatgttaaaatatattggtaatttcataactaaatgaaggcttttcagtttaatgactattctttccggggtcttcttaggctgactcagtcattgtatatgaataccatagaaatagggcatgcatgttaaaaattgtcagttattattcttgtgttatgcattgtgagttccctcataaaagacattatgctcacaaaactcgtttactctgactaatggtgctatgaaatggaatagtatatgttttccaccagagggagtcttacctatgattccatgcccttttttttttttttttaattctcaaagagggcaaacacagttttcctttcctattttatagatagaagttactattttcatcattatttttaaagcaaacctcctgtgtgttacacttaagtctcagtggttgatcagtgtaggcttctttgacaatcgtttctgatctttagctgagtctagatggtaaaagtgaactagtgaaagggaagaatgagttttgttttggatggcatctcattattttttattttctttttatttatatatttgtttttcttatttttttttctttttgattttaatacctccaccctacttacagatattttttattttcttgacaactctgataaatgatggattggaggatcagacttgttgacatcactgatgaggcttgtcttgttgcttgtcttctctggctaacattccttagtaaaaatatttctatatttttttctttattttatttggtcattatttcattttgagcttttttcatttattactagataagcgagttttgagtgtcaaatttgcacttaatttgtttttggtactgtcataaggactgtagcatacacagcatactacaactgtaactttttacgaaaatatacattttttgaagatgacttcagaaactgagggagagagacccacttgagactaggcagcaaacagtgaagaagaaatgagcaacatggtgtgcaggagcaaagtttcctactgtatatctctactctaagtgtacaatgcctataaatggaaagtatgctttcttggctttcctttagcctattttccaagcaagaactattgttgttggtaatttaggtgcatggaatagtaagttgaagtcttgaattcttatttaataataatacacttaatacattgtcagtgtttaattttgtcttcccattgttcttattcctgctagttttcacaaatagaaaacttacattgaaggggaaaattgccttaatgataattgtgggtgtgttttttcctctatcttttatttttaggtgcagttttcttggttattttttgcaggagctatccctgtatttttttcattttttattgtaactctcctatgccattataataattgggatcctgtgatggtgggaatcagaagaatatttgcttttatatgcagaaaacatcgaattcagaggtaagtttagtcccaatacacatttttaaaaatagtgtttgctagataactgagaattgcatcatgctggcctagcttttagagattttgtgaggaattattgaaagatgataacttatatgttacggcagatgaaaataaaataattggtttagatcttttgggtaataagattctttctcctttctttctttctttcttccttccttcctttcttcctttctttttctttctttctttctttctttctttctttctttctttctttctttctttctttctttctttttctttctctctctttttctttccttttctttccctctttctttcttctctttcttctttttttctctttcttgacagagtcttgctctgtagcccagcctggagtgcaatggcacgatctcagctcactgcaacctctgcctcctgggttcaagtgattctcctgcctcagcctcctgagtagctgggattacaggcatgcaccaccatgcccagctaatttttgtattttcagtagaggcaggtttcaccgtgttggccaggctggccttgaattcccaaccacaagtgatttgcctgcctagtaactacatttttttaaaaaaaatatgattcacaggtaataccaaaaggtttactgttttgccataacaaacttaaatatagaaaacttttattggtttgaacataattcatgatagaatagtattgcctcagtttttctttccaatttctttctttttaagaatgaaagctttttacattttgctataaaaagaacttggttccagtgactctggaggctgaggtgggagaattgcttgaggctaggagctcaagaccagcctgggcaacatatcaagaccctgtctctaagaaaattaaaaaaaaaattacccagacatgatggcatatacctgcagtcccaagctacttgggaggctgaggtaggaggatcacttgagcccaggaattcaaagctgcagtgaactataatagcaccactacactttagcctgggtgacaaagtgataccctgtctcttatttaaaaaacaaaaagtgagaccgtatctcttatttaaaaaacaaaaagtgagaccctatctcttatttaaaaaacaaaaacaaaaaacgctaacttgggacaagttcttgggaaattttatcctagtgttggttctgccactgacttgcatcctgtccacatagcttcaggcaatggaataaataaggtttgaggttccttttcagctctaaagctttccttaattactgcttttttttttcttaagagttccagaagacagcgaacagtgtgagagtctcatttctatgcacagtgtttctcaggaggatggagctagttagctgtctgttgtctgtagcccaggtttgtatgtgagctgggtttagtattgaataaggttcttatctgtgtaatattcaaaggattgattttctataattagttgtttgagaggcaatacagccttagaggctaaaggggctaaagcctggactccagttccgtcttctccacatactagctgtgtggccctgtgcaaggttcttaatctcttgatgctccagctttcttatttgtgaaatgggattacagtagaacctcccttatgagggtgttaaaatagtaaatacttggtaaatataaagtatgtataatagtgcctgactcaaatgatcagaaagttttaactcatttttattcatgctaagggtcattttatttaataatatgctttagaaaaatattttttctctgatgataaaagaaaaatgtaatattctggtgtacaatatactggttggaaaatactagtctttatgtgtctgttttacataactggcacagtgtttatcctcattctctgacattgctttgtcatttaacaatgcttctggaatttttttccattttttccattttaagaaatagtgtcttttatatgtcttcgatgatagagtacatgacatttaatattttgctgaatgaaagcttgaattaaatgtaacgtacagattttgcaggtacaaaagtgattatttagaatgaaagatcacaaaaaactactagaatttttctagtttttctaagacatctttaggcaatttatattgaagtgtttcttgattgctactgagttttccctccctatctagaacattgtacaactcctgtcagttgttaacacttatattaggcttgaaggttaagtttcattatcctcctggtaaacttgcttctaacctacagctaatggtcctggttttctgtttttctttagtgtgctgtttttaaatctagtttatacctgcacatggtttgagctctagttctccaagactttttgtacaaggcagttacccctgcccttccctgccctgctcatcctgctttcattttcttcccactctgaggaaattaaactcttagctgattcttttggtattttccttcttgtctccctaagtatcatgcttatgacttgtgtttcatgagttctcggttttaggcatcttcagctgactttcccactaagatcaacgaggacagattattttcaagttgactcctcctctgctcccacctcataggcctcctgtctccatatcagttctgcctcctcatcatccctgtgtagttgttgcataactttggatagatctgtagtcagtgtttatattgttgtcactaaaaaattgttacttatgactgagctatgtaggattcgtcctggtatttcccttatccagagattctctgttactaccctttttggagagtaaaccttaaagtcttctcctggggtagagaaaaggcacttggccaactgtgaaaagtaagagagggcatctgagtgtctgtctgctttttctatagacattataccagtcttcatgtttttagttgtttcttcacccctccttacagagatatctggtcctgtttttccattgctaaccaagagttggctgttattttctcatctctctacttttctttttgtccatgtggtttattccttttaagaaaaaaattccaggctgggcatagtgactcatgcctgtaatcctagcattttgggaggccaaggagggaggataacttgagctcaggagtttgagactagcctgggcaacatagtgagaccttatttctgttaaaaaatatatttttttaaccctttgtttcctttttagtgaggttttggagaacaagtggaactaaatatatgtttatgtgccatctttaaatttaaaaaaacgtaaacacaattacagtaagtcctcacttaacatcatcagtaggttcttataaactgtgactttaagcaaaattacagcaaaactttttttttttgcatcaacattataacataacaacactgaacgaaaaaatgttattcggggacctaaagtcagtttcctagaacctatgacattaagtgaggactttgtattcttgaaagctttttaatgctgtaatttatgcattatttttcttgggtatgctgtgcattgttctcgtactcacacttaaacctacccatatccagcaaggtttcagtatttttagaagtgagagctgtgtaaaggagagagtgaagactagggaggatggattgcaatagagtagaatagactgggcaggtgactttgtctttgcaggagtaatggtggaatataccaggagtacaactaactgctaatacacagtctttagtgttgatgtcagcttttgacattgctatagaagtcacattcataagttcttagtactccaaatttgagtatccagttattaagtatgtatacagtgaaaataggtatttcaattttaagataatttgctttttaaaatgtaaactatagaaaactaaaactgtgaaattataatctaatcacatttctgtggtttctgtttttagcttgataatggaactatacagcgaagagacaatctctggcaagtttttgtagaaaaaatgtttcagtgcctagtctgaaaaataacagtttgagttctttgaaactctaaaatatatttttctcatacctgttttcttcattttcataatgaagcactttgctatgtagctgtgtacatatcactacagttataggaagtttcagtctacagtccatccaaaggaccaacctgccttacacatctcaaggaattcagctgttgaaatcatttgaactaatcaaggaataaatcctaatgttctgggactttattttcacatgttaaatgctggaatatattatgaaaatgttttcaagaaatcacttaagtgttcatagaccagtatttctgacaggtaaaatgctaaaataagctacctgtaataagtgtggattatatttttgggttttgtagaatattgcaaattaaccacacaaaaaatgtttaatttatgcaacaagcatgtttgtgcaaatttcatgggactttaaaaagaataagtatttgagaaaatatctggttcacttacactacatttactgtattattcttttatagcattaggtgccttgtattttaaatctgtgacaaaccatggcaaatttttaaaggggaagtattattataaaatgaagaaatatgtatttctaaaggctatattgctgtaaacttaattgataaagctctgtttaatttagagttttgaagaaatagtctcccttcaattaagaaattttcataatggaatgatttaaattgaagtgacaaagagtattattaaaatacaatgtttatacgtctatttgtgtattgtagatgtatcaagtgatttctaatttttttcacatatgaatgtgccagattactctagaactagatgtctcttctttaaataattttagttttcctgaataaatttgtaatggttaaagtaccaagtaagtaaggcgagaagggattctgtttttaaaatcacatcagaacttttcctctactaagattataaattaaatgtaaaatactcctaattgcaattcttaaacttaggccttacatgtacttattatgcaactgctcctggactctattcaccatagatatcagtaaacgtatgtcccaggattcacaggcttttgattaatcaatattcttttcaagtttgctgtgaagagtttagttctcttcaaaatttcttaactaatctgatttttaagaattctctttgcagtgtttagcttcctattcacattcttaaaattgctttggtgttaccatgagtctaaaatgaagtttagccttccttttgtttcattctgagaacttctatattatattacctttaaaaattgtttatgatattaaatttaaaatacaaacagctctctttttttttttttttttttttaatcatccagcccaaagtggcaaaaacagctcttttctcatttggcaccaccaataacgcaagttaaaaataatgttgagtttattatacttttgacctgtttagctcaacagggtgaaggcatgtaaagaatgtggacttctgaggaattttcttttaaaaagaacataatgaagtaacattttaattactcaaggactacttttggttgaagtttataatctagatacctctactttttgtttttgctgttcgacagttcacaaagaccttcagcaatttacagggtaaaatcgttgaagtagtggaggtgaaactgaaatttaaaattattctgtaaatactatagggaaagaggctgagcttagaatcttttggttgttcatgtgttctgtgctcttatcatcacacaggtcatgtgttgttactcaggattctggaagtactaagccgtagttaacaggctggatagatcttcagccaatcttctttcattatactgctgcttttctgtttcttaaaaaacaaaaatcaatgaacaacttcttcagaaggaagcaccactgttcaattggttaactgaaagtatgaatcactgccgctttgcttgcccacctgtttgctttttctcacaggttttatttatctgaatgattgttgcatttgaatactgtagccatggtgagtgagcagttgaagacttcctttctgcaccttcatagttaagggttcatcttctcaagaaataaagttgtgctgggttgtttcaattctgtagatcacctagaaactaggtaacaaggcccttggatcacaatgagcacattgcaggtctttggaaatgctgggaaggggttacattcaagtaactgctgacgtccttcctctctgtcagacccatgttggcctgtaattatatttttctgaatctaaaaacaaatagaaatttctgatatcttttcagtctccttcttttctttccattcatcacttaaatctcattattgtataacgtttcaaattatgacctggattgaaggaagtctgttttgtcagggactttgttaggtgaacatcagaatctcaactacaacaaagctgaaaaatgaggcagccttaacagtaaatgcttttgggccgggcgtggtggctcacgcctgtagtcccagcactttgggaggccgaggcgggcggatcacgaggtcaggagatcgagaccatcctggttaacacagtgaaaccccgtctctactaaaaatacaaagaattagccgggcgtggtggcggcgcctgtagtcccagctgctcgggaggctgaggcagcagaatggcgtgaacccgggaggcggagcctgcagtgagccgagatcgtgcccctgcactccagcctgggcgacagcgagactccgtctcaaaaaaaaaaaaagtgaatacttttgaaatgaatgctttttgaagcttagaagaaccattaggtttatgtaatgcacccatacttattcctttaaataaattttaatttaaaaacattgagatattggcttctgtcaacctgatttaattaattctttacattaagctgattttccccctggcagctgacaaataagttcattgttcttgtagaagtgagctcacaaggttaaatgtgaatgttctcaaaggtacacagccttgtttcagaagaattttaatgcccgctgtaaaatcaatcatgcagagccaatttgaggtatgactccagggtatgcaaggtatgacttctctggaagccaagtcttttcacagggcactgtggtaatacccatagcactaatcctcagtgtgctggttgaagaaataaaatgtttttaaagaaggataaaggaggaattaattagaaaatttttttccacatattagcaaataaatgaaatgtcattttcatattaagtaagtatagttatgatcttcgtttctacctactctccttttgaaatattctttattactaaataatattttaggaggagttaacagaaataattacctgtaacatctgcagataaacttacatagctaacattgtgtgctgacttttttaaatggtgaagtggcattaatgagatgttcagtttacagaatttgaagtttgagttctattttaatagtctgccgtgtcccccaaatcccatttagataaattgaggttgatttttcacatagacttgcaatttttagacaccacattttttttatagtaacagcctcatttgcctgtacaataactaataatacagtatttcataggtacattgtatgtgcacaggaaatttttctttaaatcttaagagcctttaataaacgggatattttaatattttaatgttactacatttaaaaaatagtgttttcctacaaaattttctgtattcagtatacgttaactatgaaaatgtcaaacaatgaaatcattgaaatatatttaaggaaaaattaccaaccaaaagtaatgagtaccctctatgtgcatatttactggaatgttcatgtgaaatggtaacatttccaataacagcattttgaatctggggtgacacaaacatgatttttatttttgagctagggattttgatggagaagcacctagatgaagacaccatttcattcatgatattttaaaattagaaaagtaaagcttctaaattgaaactcttaacaggtcacttcatgaaatttttagttttaaatttaattttacatgagatgtctttctgaagagctacttttattaactttcacttagatcgttgtatgctaggcattcagtatttctctacttgattttcctatgcctagttgtgattacagcaagtatttaataataaagtcagtcatgtgagagtatccattaatttcagtgggtccttggaaggcaggcagaagatttctgtccaagagtcttatttttgacatgagatgaaattctttttttttttttgagatggggtctcactctgtcacccaggctggagtgcagtggcaggatcttggctcactgcaacctcccaagctcaagccatcctcccacctcagtctcctgagtagttgggactactggcatgtgcccccattcctgattagtttttttgtatttttggtagagatggggtcttgctatattgcctaatttttgtgtttttagtagagatggggtttcaccatgttggccaggctgctcttgaactcctgagctcaagtaatctgcccgccctggcctcccaaagtgctgggattacaggcatgagccaccatgcctggctaaaaccaattctttagattgtttttgccaccatttgcttacttggaatagctttcacatttatttttcttatgaagaaatccagtgtcagtcagaccatgtaacatcaaagcaaaatttcattgaagcctatccttgtcttaattattctaaaataaagtacaataaagtgaattattttgccctttgtagtagcatagtgttaagttatatatatattttaatatgcatactcctaagtaaagtttcagagaccacatgctggagagcagtggctttcagacagcatcagcatcacctgaaggccttgttgaatacacattattggaagagaggggagaacacaggctcatgcctgtaattccagtgctttgggagactgaggcaggaggatcacgtgagcccaggagttcaagatcaggctgggcaatacagcaagacccctgtctctacaaaaacaaaaacaaaaaacaaacaggcatggtagtgcatacctgtagtctgagctgcttgggagtctgaggcaggaggatcacttgaacccaggagttcgaggctgcagtgagttattattgggccactgcagtccagcctgggcagcaaagtgagaccctgtctgttaaaaaaacaaaaccaaaaacttgattgctgggggccaccctagagtttctgattcagtaggtctggcggtggggatggtgggcctggtaatttgcctttctaacaagcgtccaggtaatgccccagctgctggtcccaggaccacactttgcagattattactctgagaagagcactaactctgacgttggattccttctgttcctcattagtgaatttatttgggggagattattcaatctggtagatccgcatttacttagctgtgaagtggaggttaatgcaacctgcctgagactgtgagaatgagaaactctaattgaaataccaggcccagcgtgcctggatgcttgaaaaatgctgactcccatggtccgtccttccctcactcttctcagctataaagtgagaagcgaaattcagtatcttttaagattcctctcaggtgtaaaatgctgtgattctaaaagtttaattttgtagttccagagacaatgccaaacacctgtgtgtgcttagtgctttgtaaagagtggtaataacagtgacaccacataggccgtagttttgtagttccagagacaatgccaaacacctgtgtgtacttagtgctttgtaaagagtgaataacagtgacaccacataggccatagttttgtagttccagagacaatgccaaacacctatgtgtacttagtgctttgtaaagagtggtaataacagtgacaccacataggccgtaattttgtttttgcttttgttagggtgttcagcatcttgactccttaaataaggttttcagtcagatttataaagcagcattgaagaagttgtattatatttgagtacagttggaatccatggcagttttatggaggccaaatatatcagatgaataggctaatttccctgagttgctggccttattagtccctactctgttgccccctggttacctaatgcatgttcaaaaggtatagttttcatcacctgcttgatcttgattttcagacagcatcaaatcagttgcaaaacaaatccaagctaaaattttgagtgtatgattaatttactatagcatgtaattatgcagtattttattttttattttttattttttttgagacagagtctcactccattgcccaggctgaagtgcagtggcacgatctcggctcactctaacctctgcctcctgggttcaagtgattctcctgcctcagcctcccgaatagctgggattacagacatgcaccaccacgcccagctaattttttgtatttatagtagagaggaggttttaccatgttggccaggttggtcttgaactcttgacctcaagtgatctacacgcctcggcctcccaaagtgctgggattacgggtgtgagccactgcgcccagctatccagtattttatttaaaagttgtcactagggtgttcactattgtgaatttataatcttaaaagttggggatgctaaaagtaccagactaaaatactacgaggttttctcatcttttaattccattttgttagaaaaaaataatcacaaccggggttcttttacctttccccagccatctagactgctttactgcaatgttgggaagattgcatacaataaaaactgtagctagttgattgggatttgggaaaattgaatcaagcatttgcattcatccagaatggtcttaaactgctgactgtggggtgcccacaggatgagcactggtggcatgggtgggaggaatttccttggatactgcaattgcatttgaaagatctattttccaaaacctgagcagagagaggctaggaggaatgcagacaggacattgaaaatgcgaattccctttactagtagaacatgaaatatctgataatggtttaaaaaaaataagtgccaggatacattgtagtataaaggttcaactagtataatttaaaatgagtctttatattcaggccaggtgcggtggctcacacctgtaatcccagcactttgggagtccgaggcgggtggatcacctgagattaggagttcaaaaccagtgtgaccaacatggagaaaccccttctctactaaaaatacaaaaaattagccaggcatggtggtgcacgcctgtagtcccagctacttgtgaggctgaggtaggagaatcgcttgaacccaagaggcagaggttgcagtgagctgagatcacaccactgcactccagcctgggtgacagagcgagaccctgtttcaaaaaaataagaaataaaaagtgagtcttcatattcaaattagtatatgaggttaggcaacaattcttatatgggaccaggtatatttaatttgcctttctttgcagtcatcctagtaaatccttgtaaagggttattttatatacaattttgtagtatattctaaatcccctttggcaaataaagctgaagttatctagtgtcagcatactgtgatttgtatatttatataagacaagattgcatcattctgattaagttgcagcattttagttttatctgataggcctgtattgagtaatcagtagctatgtgcaaatattaagtcaacttaattaccagacccagaaggccagaggtaatcaaagagtactttcggaagatgaaatatttataatgagttatggaaacaatgttttagaaatgtttttcttggtgtaatttaatgcagatttttacctcaattttgttaaaaaacttgataatttgatccctccatctatttaatatttaatattttcagattctagagtatttaaaatttaaacacaattataaaattaattataattcctacttatgttagctatgatttagggccaaaactaccctggttttgtcttgcaacttgaaacattgtgtattttaaactatataatttgggaacattattttatagactgtggataaccaaatataagatttgtgatttttaatgcttcatttgtgtaaaatcatttgtatattctatttatagtatgcattttctagctcattaaaagtacagaaaaacctcaaatctgtccttatacaaatatttgatttctagtttccttttattaaaacattttcactcattcattctttcacaccttagtctctaagatgtgtctcgggtatttgataaagtaggtcttcttgtggagcacatcactcagctttggagaccaaacattaaacacactgagttgcatcttatgcatgttaaggtctaaagccaaaaggtgaaatttttgaataatcaaattgcccttgggagggtcctgaataagagacctacattccatctcatgataagtcccttccattgaacttttcctccaaaattggaatagaaattagcaacagcagaaagccaatgctatccctaggatggtggggtggagggaggaagccgtcataaagctcaaggccagggtcacccagaggaagcacaacccccgcagcagagcacaggggccttcagggtgctgcagctggaggcaaagaaggagggaaagaaatactctcgctttgctttgctttttgccattgactcccggtggcaggagctgactggaagccagctggcacaggagcttggagcttggtggtatccctctggtgtcgactcccctgacttagagcagagccgcagacctcaggtcaagcaggctcagaattggcacatttgcactggggaccatattgtatggacaacacttactttcaacagtagaatcacagcctgcgaagatgtcacagtacaagaaatattctggaaccaagatcacctttatccatgtcaagtccactccagaaagtggaattaggggaaagtacctgccctggactagtatttcgaatcccttccctcctctacttactcccctttccctttttcttctcccaagctgagctaaagggaaatgtgaagaacattattgcctctttaaaaccaaacatatataaaacatgaaaaatatttttcagtgacaaaagataagaatgaaagcattcaggatagtgtattcatagaagctttgggaaagagtaaaaataatttcttaaatttttttcttgaaagactgaaaatagaatcttaaggagatagtgttcttaaagccttgatctgactacttgactacttataacttctttcttcatctactaattattttgaaaagtcacttagtcatttgtcaatcctaacctttagagataaacatttaaaatcagttcactaatcacagcatttttttttttttagatggaatcttgctctgtcgcccaagctggagtgcagtggcgagatctcgggtcactgcaacctctacctcctgggctcaagcgattctcctgcctcagcctcccgagtagctgggactacaggcgcacgccaccacacccagctaatttttgtatttttagtagagacggggtttcaccatgttggtcaggatggtctcgatctcttgaactcgtgatccgccctccttggcttcccaaagtgctgggattataggcgtgagccaccgcgcccggcccacagcatcatttttcaagggtctctagggtgaccaggtgtccgggtttgccaaggacagtcccagtttctacctgctgtcctaggacaatcatgaatagtgcccctttcagtttcaaaagtgtcatagtttagacattaaattacctgaccacccttatatgccccatgtttcttaacatctaggctgctgacaaaattcacattttctgactgtcagtctagtgttctctatactagactgatacggatccacaaaggaagcaatattggccaacaattaatcttcagtctttggattagtgagaggtgacaacgtgctggcagccgtcacagccctcgctcactctccccgcctcctctgcctggtttcccagtttgacggcacttgaggagcccttcagcccgccgctgcactgtgggagccccttcctgggctggccgaggccggaggcggctcccccagcttgcggggaggtgtggagggagaggcgagggcgggaacaggggctgcgcgcggtgcttgcgggccagcgcgagttctgggtgggtgtgggctcggcgggccccgcactcggagcggccggcaggccctgccggccccgggcaatgaggggcttagcacccgggccagcggctgcggagggtgtgccgggtcccccagcagtgccggcccaccggcgctgcgctcgatttctcgccgggccttagctgcctccccgcggggcagggctcgggacctgcagcccgccatgcctgagccttcccagctccgtgggctcctgtgtggccagagcgccccctgctccgcggtgcccagtcccatcaactacccaagggctgaggagtgcgggcgcagggcgcgggactggcgggcagctccacctgtggcccctgtgcgggatccgctgggtgaagccggctgggctcctgactctggtggggacttggagaacctttgtgtctagctcagggattgtaaacgcaccaatcagcgccctgtcaaaacagaccactcgctctctgtaaaatggaccaatcagaggatgtgggtggggccagataagagaataaaagcgggctgcccgagcccccagtggcgactcgctggggttcccttaccgagctgtgggagctttgttctttcgctttttgcaataaatcttgctgctgctcactctttgggtccacactgcctttatgagctgtaacactcacggtgaaggtccgcagcttcactcctgagccggcgagaccacgaacccaccagaaggaagaaactccgaacatcagaaggaaccaactccggacatgccgcctttaagaactgtaacactcaccgcgaggagccacggcttcattctggaagtcagtgagaccgagaacccactgagtccggacacattaggatgttagagtcccaccttcaaagcatttttctcctggagtggactttgcacaaatggtaggccaattgtggagtcagtgaagaaccaggctaatccagcttgttttattggccccagtttttcttctcagggccgtaaaccagttattaccaggaaacaaaagcaaagtaagtattaagttttgaattggtattgaggagaaacatctaaaatcaagtctcgccaatctaattaaattagattcccaaaccggaagaagctttgcaattactgccaaaatgtctcagagggcattaggttaattgaagctggagaggagtgagaaaagaggcagctgctagtcactgagaataaggactctctatttgctgtgaggtttgtaggggcagcactttgctgttggggtttggtaaggggatttgttttaaaattggaattatattttgttggcttttaatcataagcagggaaatacatttttcctacgcctaagaatttacataagctaatttgttccataattagaaaaatccttgcttttagcatatggactgtaacaataggggttgtaactcgtgagtcgtgtgacacattgtttccctttggtgaagttttactttaagatctgttgagtatatccagggagagagatgaaggtcaagacatgcttatttttacagagagagagagagagagagagaaagagattcattaaactttgagttatactttatttttatttatttatttttttgagatggggtcttgctctgtcacccaggctggagtacagtggcatgatcttggctcattgcaacctccactaccagggctcaagtgattctcccacctcagcctctcaagttgctgggactacaggtgcacaccaacaagcctggctaagttttttgatttttagtagcaatgaggtcttgctattttgcctaggctggtctcgaactcctggcctcaagcaatctgcctgccttagcttcccaaagtgctaggattacagatgtgagccaccgtgcctggcccatattttactcagtaggaatctttgctatttgctatgatttttaattcttcttgtatcttaattttgcttccccaatgagtatgttaaatgttctttaaaatcttcctgtaaaaaagtaaacatattaaacagcagttctctaattgaa

SEQ ID NO: 6 - DNA, 2304792 bp, Homo sapiens
caggagctggcggcggcggcggcggcggcggcgtctcctgctctccgcggctgttgctgctgctcgcgctccgccgcccgggagatgcttcctcgcgcggcgcagcgctgaggccgtgcgtgcgccccggctgcgctgcgcgctccccacatacacaagctctccatgtgagctgacaggcgagtggaaacccctcgagtcacgctgcccggcggcggagggagcgctcgcccgcagtggcaacagctgcaccaccgtccccgtcgctctgccttcctcttctgcagcctctgctcttctgattacctccctcccccgtcctttggtgatttttttttttcaagaaggagagggcggggtaggtgtccgttccctcccctcttccccctcctttgccttcttggtttgaatttcctcccccggcgttgcactggcacacagtgcaagaggcaatacccgcacggagggagaacgaaggctgagactcccctgccgctccaagcccggaagaactggagcctggaggggggtgaggggagaagaggaagcgggaggggcttggcttcctcgcgtatttgaggacagcccatctcccttcaagaaccctacggagagtcggactgcatctccgcagcgagctcttggagcgccgccggccgggaggcgaaggatgcaggcggctccgcgcgccggctgcggggcagcgctcctgctgtggattgtcagcagctgcctctgcagagcctggacggctccctccacgtcccgtaagtagccgtctcctcgctctgctctggagcagtttcagtgcggcattgatgtttggcaccagggtatcaactccgaagtgcatcgcagtgctggcaccctgatgtgtttgtgtctccgctgtcacacacttgcagccactgcagtagacaaactcgaaacccagcgtttctgttttggaagagacagggttgtgacgctggtgatgtttctggaaagttgttcctggtcttggtgatcggttggcaagagcttggctagagagactgatgtagatggcagcttcttaggagttgtttgtgcagggagagttaactgcatttggcttaggtaggtcagtgaatgaaaagtgaagaccatggcaaaaccaagtttcttatttttatttatggttataacttaatgagcacggggttgaggttaacaagaggagcatgttttaaacagtttgggcacctatagggtctctttaacctctcccgttcccttaaaaagttaatgcccatttagtacttgcttattaaaatggaaggcagcgaaattgtaactgaaattgctttaattctttgatactttgatatcatggatatgactgatgcagtacggtacttgggacactcagtgcaaagcgtcgttaatgtagtaataaacagattcttaatagggttttcaggaaaataattatattcaatatgtatatctctgcattttaatcaactgtgtgtgtgtgtttgtgtgtgtgtgtgtttaagactgcccctgttttcatgaggtttagaaagaaatggaagattctggcccattttctgcattcctttagaagtgcatactgtgcatgtagagaggaaatgcatgattgttcctttggttcagaaagagttaaacactagaaagactgcctataggaatcttaggataatattcataagcgcatactagtttctgagaatgagtaagttgataaagaattatcgtggagatttcagagtttaaaaggaagatttttttgtccatttaggaaaagaaaagtttaatattttccagaattcgtcatatgcgaagtagtctttgtttctaagattttgggatgtattaatgcatctttgttaataatgatcttattgtagtggtaaatatcaacaggaatagcattgaaaaaggacattataagttgtaataaggaatctactatataatatccggttatgagccagtattactgttttgacatatcttcctaagtacagtattagcttttcttttcccacaatgtgtaaagataaggagataaactaactggcaatctaagtttgtaatgaacttgaaaacattgtatagcattttttataacacaagttaaatcacaaagagttaaatattgttaatatttatgtcaattttataaatttaaacaaattttggggatataatgcttgctgttgatatttacacaaatatgtaactctatcactgggaaactagtttgatgaaatttctgtttccatttcaaggtctggttgtatagaatttcctgccacttttcctggaaaataaactcctcatatattaaatttattatattcactgattgaaggtcctcatatccagggtttttcctgggttctgtgttccatcattctgtatactttaattttgatgggtccatctgaaacatctgccatgagtagcaaatggaacactggcagcccttgggttaatgcattttaagataaaaaagttgttatttcataaatattttctgagttttcaactttatagttagaatttgaagacagagaacatagaaacaattacttttaagatggttaatagttatggccattaagattttttattaacttggctttcattctctattgtttaaaaatgtgtaatggcttaattaaggtggctttttatttcgtttgaatttaaactgtgtgaccaaaatgcaaagttgccctatatcctggaaatgaattaaataataaggatgctacagaactttattgattagaatgagtttcatggattcagtactttaaatatcaactgtactttacattaatgaacatttttatttacattatatatagctctgaagaaaagtatgatagttatattcttaatataaaacattcaaaggagaaaaagatggaaactacatgaatctaagataatgagcaactcaaccaggagaggtcatcacaagacaaaaagtagcatgaaaatctaaaactatcatttttctttggtacacatttttaaaatgtgatgagtatgctaaaactttctgttcctaaatacctttttaatatgagggacagaagatgtttatttcacaacaactgcatttcaaatatgtatttgcttatgacttatttctttttctctgtcgacagacatataaaaactgttaatactatgtgttgtacaagcagactagaataaacttgaaaacaaagctcatcactatggttatgtaaaaatataatctaatttctttgcagatagcgaaaatgaactgctgctgagctgatgtaacaaatcgtgtatcttcccttcctgtaaatgtagatacacgggacacacgtgggaagtttaaagaaaatatttcactcttagggagttgcatttatttgaacatattataaagaccttgatggtgcagttctaaatgatgaggagattaagctagcgcttaataaattcactttttagagttaactgaattttcacttaaataaatgatctctcataaaggccaatttacatcatttagtagaactattaacctataatttcattgaccaacacatttgggaaatgtgttttgaattaattcacatattctctaacaaatacgattttatacgtgtatatatacacacacatgaatatatatgtgtataaatatatatgtatttgttcatatgttttataaaaacatttgaatacatgttataaagtacatagatacatatttaatatagcacatatattaagtattatatgtaaaaatgtgtatatttatatattttctaaaacaccattcaaggaatttaagttgtttacaagtttatagaaaggtctttttccagtgcaattattttaagtaactaacgcaacaatattaagcaatagtatattagtctattttctcttcctcaattcatatacttctcccaaaatggtgtattttaaatgtaaaatatgtaaatgcatataaaagcaaatactgctggtttatagagaccttgaacataataatgaacttgtcttaatgaaaacaatttaaacttaaaaggagctttaggcaagcaaaattcattggttgataaagcatagcacattatttgcttaatgcaactaataattattaactaattggagagaaatgtataatctcgattttattataggcacggatattcaggaagtaagaatcattgttcaaattttactctttaccatcaatatatggcaaaattgggcaaaaaaattaatccacaaatttaatttaggtcttattaacctttatgcagttataaacctacaacgtatcattttagatgatatcaaagttgtttggtgcatatcatattttaaatcttacagttatgtgccccataatgacatttcagttcaatgatggaccacgtgtatgttggtggttccataaaattataatggagctgtcatatataggtgtgccatttttcatcttgtatattatatttttactgtatcttttccatgtttaagtatgatgagatacacaaagaggcattgtgttataattgcctatagtattcagtgtaataacatgcagtacaggtttgtagcccagaagcaacaacccataccaaatagtctatgctatgtgtgtagtaggctacactgtctaggtttgtgagtgtgtactctatgatgttggcacaaagacaaaattgcctaaggatacatttctcaaaatatatccttattgttaggaaatgcatgatgatatatgttttttgtctattttaagtgggaaaacctttcaagttctataatttctttgagatttaattcactgttccttattagtaaattcttctagacaaaaacttactcaaatgtcttaaagtttacataaagcttcctttttttttttttttttttttttttttgagacggagtcttgctctgtcgcccaggctggagtgcagtggcccgatctcagttcactgcaagctccgcctcctgggttcacgccattctcctgcctcagcctcccgagtagctgggactacaggcgcccaccaccatgcccggctaatttttagtcttgtgaatcttttttatgattgaaagagaagaaatgtgacatgtctacacatgtcatctgtttttaaaaagtagatttttgtatttgttgtaaatggtatacagaatcaggagagaatctaggctcagaaattcttaattcaaatgtgcttttctttaaaatattaaacatatggagatccaacttgtgcaagttgtctgtttagtgattgatgtcagtgggatgaagaaataaaacatgtactttaaagattttcccatctctagtcctgatttgtgaagtgctttactttatcattttttactacttgcaaagttataaaacagcgtatatagtaattttaagcctcaaaaccagtgttgtgtgaaataaaataaatttttatatttatatctgtaccagtatctgaaactggctgttacctgtttctagagagacacatattttaagataagtagttatcagaaacataaggtatatttctacaaccagtattgggctgctgaaataaattatatgcttatttttgccattttaataagtaagaataatgatgcaatcatttatatacagctgttaattttcaaatgaaagccttgaaaataatacttgtaacagagtgattcactaaaacactggattttcccatctcctgggctctgtagaagctatatgttttagttctgagcagataaggatgttggaatgtggaggtgcttcctctttctccatcctaacagttcattttatgggaagaaatgtccgtctatcacactcttagagtctatgtctacagttcattcgttccttcctatgttaggtagagttacttatctgtttggtgactatgggaaaaggacctagatgtgcttagctcagcccctcctttctccttccaggctgcctgcagaaagaatagattctgctgaacgatagataaaagtaggctttgcctctgcactaatagtgatagcgcgaagagccttatggtgttcggttcttcctatggcttgagactctgtttaattttagaaataaggttaatgaatcccactgtatcacacatttaagccttattcttttgtatcagcaatacttatataaagaatgttatttcctctctgtgagttattttctaatctagaactcagagaagggactgagattgactgtactcagtaaaaccacaaatatattgaaattgccaaaaataagattgatattaaactaaatgaacatgaaataatttctgcatagtttagaaactagtaaagaataagacttggtttttccattgatattgagttgaagatttggtgttactctggttaggacttccaaactctcccattcattcattcattcattcatattcctacccagtgctatccgtggtattattttacagagatgcttagaataccgtttctttatctgtggtaaataacattgccatttaaaatacagcctatttacaaactttagccagtacacatccaatttcatcctgtccatgtaactatttagtaaattatatatgcctttagttggctgttacatcatgatccttctgtaaaatcctgaaggttaaatgttttaagccaattattctttccaacaaagcatttgcacttagaaaacaaaattgattctttcttcaattgtaagttttgaaaaatatcttcttaaactcttctttagttcactttggaggtagctattcataataacagcttgaagtaactgattttttatgacactgcagattttaaagcctcccctgatagtaggaaatctagatataaagatgtggttgttggctctgaatttgcttgctgaagatcacatattttgggtatactgtaaaaatgttgaaaaaatacagaggagctcctgggggccgtattctgtatttaccttgtgatttaggtttgcttgaaataccctcataaacataaatagtgatatatgctttaatgtttttatgtttaggaaagaggtgaaattagattctgagaatacttttaccaggaaaaattccccaaacatatataagtttttccttaccttttctagtacattcacaaccttcttcatctgcactgggatggtgatctggaaatgtgaatcatagaaaatggcaggcaatagaggtgtgactggcatacgcactgtcaaaattactaaacctgtgttgtctggaacatctaagatggaatcaagttacataaagtttagttaaattcaggaaggatttgttcacctctatgcattagatgtcatattgaaatagtatgtgaaaaggaaaatcttgcctggactcacaatttttatttactgttataatgtcatctatgctgttcaattatagtattatttgaaaggaatacatgaaaaaaataataggcacagtttgtattgttaaaaaaacagtctgttaagtggtgaaataccatgatatgccaaataaaataataactctaagaaaattgtcttaaaattaaaggtgcttctatttttaatagaaaaggcttgaaaccaacccaaatgcccatcagtaatagactggacaaagaaaatgtgacaagtacacaccatggaatactatgcagccataaaaaaggacgagttcatttctttgcatggacacggatgaagctggaaaccatcgttgtcagcaaactaacacaggaacacaaaaccaaacgttgcatgttctcactcataagtgggagttgaataatgagaacacctcagcacagggaggggaacatcacacacccgggcctgttgaggggtggagggctaggggagggatagcattaggagaaatacctaatgtagataacgggttgatgggtgcagcaaaccaccatggcacatgtatacctgtgtaacaaaccttcacgttctgcacatgtatcccagaacttaaagtaaaatttaaaaaaaaaagtgcttattgtcacttctatatcatagactgaagtagttattttgaactaacagaaaacacatgtggattaaattttatcactgttaactgattttttctaagcagtcacctcttaatgggaaccaaattattaagtaacataagtacagactgtctatatatatatgtctttttcagacattggtcaaaaatttataaacagaactacatgaaaaaatttcagcctaattatgtcacatagtgaaattatagcatattttatgggtcttatttttaaaaatttattaagtacgtgttaaataatggcctatgatgcattaaattacttaattgctaataaattctaacttaaaatgtaaattgttacgtagcatatttgaaacattttttggttcaaataaaaatatgtctggactataaaatatgactatcaggttttcagattatgaaactattatactagcttagtgtttttaatgccaaccaactgaagaaaacatgattcgggtgtttttttctatgtattcatagcaacaataacacaatgagttcgatgctgccatcaatactaatgttactaattctcatggtattttactcagtggatttgaatgtggccatagaatctttctccacacaatatgccagacagccacgtataatcccatgagatttggtattcaatataaaactttacttttttactcaagttatatatattgccaccaccagcagtttttcagctaataaagtatacttatgatttaagtcacttggttaatgtcctcatccctaaagaatatgttaaaacgaatgcttaacttatagtagaagagattttcaatggcagtaatgaaatttccaaaaatgaaatttaatcatgcctcatgcacttctgtagtatatgtaagttttatttatatatcttaacgtaagcatttaagttattaagttatgactagttaaaaggaaatagtagcatagttaattgtgtttttgtatgtccacagtacagaattaagaataactattttggccaggtgcggtggctcacgcctgtaatcccagcactttgggaggctgagacaggcggatcacgaggtcaggagatcgagaacatcctggctaacacggtgaaaccccatctctactaaaaatacaaaaaattagccgggcgttgtggcgggcgcctgtagtcccagctacttggaaggctaaggcaggagaatggcgtgaacccaggaggcggagcttgcagtgagccgagatcgcgccactgcactccagcctgggtgacagagcagagcgagactccgtctccaaaaaaaaaaaaaaaaaaaaaaaaagaataactattttattgtgtcagttgacaaaaatagtaccgtgtcagagataaaaatgtgccgtggtggggtattaacattgcttctaccattaagaacataaacaaaaacaaccttattccaatattctagatactgagggggttatttttgtggaattgattccaaagacagggatgcttgatcaaagaagatgtttagtttttggctaataaatgttgcctgattgagttccacaaattctgtaacaatttacattttcagcatcaatcaatgagtgtccttttctagaactccaggcagcagtacatattatacttataaaacgttctgcttgtattacgtaaatagctaatatttgttgtgttgacttcttattaaatgtttcttcccagcctttcaaatcaggcactactctttatgtgtactaggtcatttatttcttataacaatgcttcagtttgcaaatgaaaaaatcagagacacatggagaagtaacttccctgggccaccagcttggcctatttccaggtccagtgctcttcactgtggcatagctggctgagagtgaagtgctgtctctgtgttcaagttctctaactaagaagtttcagcttacatctaggcaacattttaaggcttgattgcttgtatataaaggaaaaagcctattggcataatgtttctatctttttgtttacttattccttgatgacactgtcatatgttctggagacttaaaaattacattggtaaaaaataaagaaatatatttgaaataaagagaggaatgcagctctttcaatggtagcacattaaatcataatatatatgtcatttttgttcttcttcacaataaggtacttttgcagtgtagttctatcatttgagtactattgaaatacatgtaatagtcatgtagtgaaaacatttatttaaagctatgtaaaatatttcttaaaatgctttgtcaggtatacataaaagctgtctttaaatcagttctcaggaaatgttgaagtctgtatcgaaaactgtaaatatgattgctattactaaagttaaaagatggtaattgtttaatctataagcacagttttgagtattcatttcatacaatagctaatccatgaagcttttcttgagagtgctgttgagaaaataactttttcctttgctttcatggcagtgggaaaatatttgtctttaaaatatttgccagtcctaatgcttaaatatttcttgtatccatccgctgctctccattcctatcacagcttctatagttaagattttcagcatttccctccaggcattaatttagtagcctcctggtatgtctcccggattctaatcttccccctctagcttatcatctatatctatgccagaaatactttcccaaaacacaaatcttgttatagtactgcatttctctagttcttccctgtctcttaaatttagtctcctcctaacccaacatttgcaccctataatctaaccgaccatactgagatctttgcagtttctctaacacaacatgctgtttcgaatcatatttctcttataccttgttacattttgtcccctcctttcatttttcctgttttatctatgctgttttagaggaaactcatttacggtccaagcctcagaatcttggagcagactgatgtatcaacacctccctgtggcaatttgctctaatcacaggtgaaatactaagacgcagcaggcaaattctttggtttctgaacttataaggaacacagtgatcacaaataatgaaaaccacctccaattatctgatattaaagtgagaaattaccccatagtatcgacaacagaaggaaggcgagaaatatattttcaaagaataaaccacaaatattttcctcattttataagtaaatgtgtatctatcataagggaaatttgaaaccatgctgtgaaagcttacaacttctgcaaccctttttctaccggattttattttaaaagattttctctgcttttcttaagccacatgggtgatcacgtgcctttaaacccaagcctgactgtcctttccacaagctattatctgaagaattatttgttatctgcatgcaaattaaagacgtgtcaacaaaataattattgcatctaacaagtactttaaatagagtacttaagatgtcaccaaatcttctaaatgatagctgtagcttctgaaaaacttgataactatatatatttagtgtgtaataatccagcagatgcgttgatattgttgaagttgttatgaaatgtcaatgaatttcatttccacttttaatatgacaaaaatataattttataagtataaaaatagttacttctattctatttgtttatattttaaactccgtcttcatccttacctttgcaacttagtacacacttctgaaccatttcaaagttggccagtctagcgaagcctgtttcaaattttatattcttcacaatgatccctgcagtgatgcctactaaaaacacattactctcttttctattagtccacaatctgcatgagcagagcctgtattttttcccttaggctgataggtattagggaatggttgtattaaaggaactagactttagtaaacatgtttcatcatattaggtactgtactggttgcattataccattacatgaaattagcccaaatacctctgtgctgtaatattcaaagtataaggatgctcaagcattttaaagctcactggttccatctttatacagttcttacttttgtcaagtccttccttgcattgatacagatttacactcccataaattccagccagtagttctagttgggcttctcaaataaaagcttaatatttacccaatattctactgccgtaaaatacttgaagacaaatatagaatctaattaaatataatttaagacttagtcgctactacttttatagatagccaactaataccttgaagacaaacacattccttaaaacactgtgatttatatttacttatgtcctccaaattacccaaatatttctaggtacacaaccagtgttaaataaatacaattgaaaatggaattgaaatgggttagctctgtatacaaattgtttcttaaagtgcttatagctaggttatagcaacaaatatacattgttgtgttttgatagctaaaagcatcatactaagaagtattataattgtaatataatgttagttgcaaacaagtgtgtctgtaagtaatcttggtattacagaaaaaaaaactgccttaaaacttacatatctgtatgagtcaaaaccaaaaatgaaacagaaatatttaaagggactgttgtttaaaagtaataggacaactacagttattttaaaagatagtttatacttatttgctcagtgtgaaataaaacatttttaaattttaatttattatctactctttgcccaaagtatattagaaaaatgttactgcaatttgagtagtcttcatattgtgataaaataggtaattattatatgcaataatctgaggcattttcgttttacagagcatataatcacccacgtatcaatttttggaatttaaaatgtgttgttggcacaattagaatcatgtatctactttcaaagagagatttcagaatattgcaaataaaaatgacattgtttcttttatcaaattggcatcaatagggcctttttttcaaaaaaagcttttagatctgctatttgttcatttatatgtgtataattacagtattcagaggatctctcatgctgtgtttgtttccacatatggattttcaaatgacaaagtctcaagtggtggcgctaaagacaaaccatgctagctactcaagcatttccttcctggagttgtactgtgtcaactgctccctaagaaatgggtaaagagggactactcagaaacatgcattgagcatcagcatgtttttgaaagattaatcttctagacctggaactaaaagtatcttccagttattttctttattatccactttatcagcttccacataacacattcagttttctacattttagtttaaaaattgccatttaattctatgcttctatgaagtcacatatcctacttatgctttcttaatttcaaaattatttgcactgtccattttataatattttatctatcttaataatttaccttaaagttctcttttattgaataggtatgacaacatagaaattaaaattattgaatcattccaattagtccacaggtaaggtcatcagtgagtgattaaggaaactctttctgttataacattttagctaaaacctaaagaaaaagccaagcaaacagcaggaaaagactgttccaagaaaaagaggacaacctcacaattccaacattggccaagtttggaagtcactttgatgaggagatatttagtggttttggaattagtcttctgttaaacgtgtaatgaaaagaaaattttgaaagagtaaattatcccgcttaattgtctatcagcaaatagaaaagaaattttcactggttagaaatataggcagtcgggccgggcgtggtggctcatgcgtattatcccagcactttgggaggccgaggcaagaggattgcttgaggccagaagtttgagaccagcctgaacaacatagcaagactttctctctacaaagaaatatttaaaaactagccaagtgtggtggtgtgtgtctgtactgtagtcctagctactggagaggctgaggtggaaggattgcgtgagccccggagttcaaagctacagtgaataatgattgcaccactgcatttcagccagctgagacaagagtgagactctgcctcttaataatttttttaaaaagaatttaggtcagtattaaagtttgtgataattcaattatatttagcttagagaattttgctaataaaaataactttgataatttaacacatatgtatgttattgaaacagcaagcattttgaagaggcaattttctaaataacctttatttcaaagtgtattgtttattgctgtgttagtttgttttcacactgctataaaggaataccagagactgggtaattgataaagggaagaggtgtaattgactcacagttctgcatggctggggaggcctcagacaacttacaatcatggcagaaggcaaaggggaagcaaaggcacgtcttacatggtggcagatgagagagaagagcatgaagcgggaggatccccacacttaggaaacaaccagatcttgtgagaattcactcactatcatttgaacagcataggggaaccatccctatgatccagtcacccccaaccaggtttcacccttggcacttggggattaagagggttacaattcaagatgagatttgggtgggttcacagagccaaaccatatcaatcgctgactttaaagaaaacgaataatattgtttccaatctttacatagtttcacataacatttttgagagtataactgtaacccaacatttacaatatatttgtagttattttttaatgtgaataaaggtaatatgactcatattcttaagaatttccccttggcattactatgttctactgtttcaaaagtttgcttactttaataagatttcaattatttggattgttaatacattgagatagcgactgaggtttattctctcatttaacttatttttcatcctataaatgtaaggtgtacaatataatattttgatatacagagtaaactgattactaaaatcagaacactaatatattcattatctcacatagtttttattagagaggtatgcatttataagctgccaacaagtccaaggattgttttaaaatgtatctttcattcttattacatttgtgacttcctgggttccatgccaattgtttgtttttaagaaatgtagtgttataacaagattgtttcagaacttcaataatatgcaccttcaaatagaatattataggtcttgctttataatttgtaaactttcagcatctttgcggcttaactttgcaacatacttcaaagacttaggcttcatctaatttgacataaaataaacaataaccagcaagtactagatgattatgcatctgatatggtttggctctgtgtccccaaacaaatcttatcttgaattgtaatttccacgtgtcgagggagggaggtaattggattatgagcgcggtttcccccatgctgttctcgtgatagtgagtgagtctcaatctgatggtgttaaaagtggcagttgtttcctgtgctcgaatttactctctcctgccaccttgtgaagaaggtgtctgctttcctttctgccgtgattgtaagtttccttaggactccccagttatgtggaacagtgagtcaattaaactttctttgtttataaattacccaatctcaggtagattctttatagcattgcgagaatggactaatacagaatctgtaataaactcatgcagtatctgtatctcagattgtatctgagattacagtctctgctaaaatacgttctttacagatgatcaatttacttagaacataggccaataagtggttatacacagatgtctgttggccttgaataatagcactggccattgtcagagttggtattggggaggttggtgtataaagagtacgaacttcatagagcagcaattctcatatgctaatatgcatataaactacctggcagattctgattcagtaaatctggagtggaacctataatgtaacatttatttatttatttgtttatttatttttttattatactttaagttttagggtacatgtgcacattgtgcaggttagttacatatgtatacatgtgccatgctggtgcactgcaccaactaactcgtcatctagcattaggtatatctcccaatgctatccctcccccctccccccaccccacaacagtccccagagtgtgatattccccttcctgtgtccatgtgatctcattgttcaattcccacctatgagtgagaatatgcggtgtttggttttttgttcttgcgatagtttactgagaatgttttccaatttcatccatgtccctacaaaggacatgaactcatcattttttatggctgcatagtattccatggtgtatatgtgccacattttcttaatccagtctatcgttgttggacatttgggttggttccaagtctttgctattgtgaataatgccgcaataaacatacatgtgcatgtgtctttatagcagcatgatttatagtcctttgggtatatacccagtaatgggatggctgggtcaaatggtatttccagttctagatccctgaggaatcgccacactgacttccacaatggttgaactagtttacagtcccaccaacagtgtaaaagtgttcctatttctccacatcctctccagcacctgttgtttcctgactttttaatgattgccattctaactggtgtgagatggtatctcgttgtggttttgatttgcatttctctgatggccagtgatgatgagcattttttcatgtgttttttgtttgcataaatgtcttcttttgagaagtgtctgttcatgtcctttgcccactttttgatggagttgtttgtttttttcttgtaaatttgtttgagttcattgtagattctcgatattagccctttgtcagatgagtaggttgtgaaaattttctcccattttgtaggttgcctgttcactctgatggttgtttcttttgctgtgcagaagctctttagtttaattagatcccatttgtcaattttggcttttgttgcccttgcttttggtgttttagacatgaagtccttgcccatgcctatgtcctgaatggtaatgcctaggttttcttctagggtttttatggttttaggtctaatgtttaagtcttgaatccatcttgaattgatttttgtataaggtgtaaggaagggatccagtttcagctttctacatatggctagccagttttcccagcaccatttattaaatagggaatcctttccccattgcttgtttttctcaggtttgtcaaaggtcagatagttgtaaatatgtggcgttatttctgcaggctctgttctgttccattgatctatatctctgttttggtaccagtaccatgctgttttggttactgtagccttgtagtatagcttgaagtcaggtagtgtgatgcctccagctttgttctgttggcttaggattgacttggcgatgcgggctcttttttggttccatatgaactttaaagtagttttttccaattctgtgaagaaaggcattggtagcttgatggggatggcattgaatctgtaaattaccttgggcagtatggccattttcacgatattgattcttcctacccatgagcatggaatgttcttccatttgtttgtatcctcttttatttccttgagcagtggtttgtagttctccttgaagaggtccttcacatcccttgtaagttggattcctaggtattttattctttttgaagcaattgtaaatgggagttcactcatgatttggctgtttgtctgttgttggtgtataagaatgcttgtgatttttgtacattgattttgtatcctgagactttgctgaagttgcttatcagcttaaggagattttgggctgagacaatggggttttctagatatacaatcatgtcgtctgcaaacagggacaatttgacttcctcttttcctaattgaataccctttatttccttctcctgcctaattgccctggccagaacttccaacactatgttgaataggagtggtgagagagggcatccctgtcttatgccagttttcaaagggaatgcttccagtttttacccattcagtatgatattggctgtgggtttgtcatagatagctcttattattttgaaatatgtcccatcaatacctaatttattgagagtttttagcatgaagtgttgttgaattttgtcaaaggccttttctgcatctattgagataatcatgtggtttttgtctttggctctgtttatatgctggattacatttattgatttgcgtatattgaaccagccttgcatcccagggatgaagcccacttaatcatggtggataagctttttgatgtgctgctggattcggtttgccagtattttattgaggatttttgcatcaatgttcatcaaggatattggtctaaaattctctttttttgttgtgtctctgcctggctttggtatcagaatgatgctggcctcataaaatgagttagggaggattccctctttttctattgattggaatagtttcagaaggaatggtaccagttcctccttgtacctctggtagaattcagctgtgaatccatctggtcctggactcttttttataatgtaacatttctaacatgctcccagatgatgctaatgctgagactgatctatggaccacacattgagtagcaatattttaaactttgaatctataatgaaagatgtcatagaaaatttcctacttattttaaaattaagaagcacactttagaggaagaaaattttaaaaatatataattatgatatctcatttttattttgggtataaatagaaggtataatagtgtagttctatgatatgattagacgaaaaaaattcagaaagatgtagatactccactaactagttggatagccttagacaatttatataatctctcagagtttaagtttttgtagttatgagagaataaaactagattatctctaaaatccattccagtttttaaatctatgattctagtctcctaggcttctgagtctgagaatggagaagcacctcttataaacctcagtcttgcttttatatctaactggagatttggaatagagtttccaggttatttatgaagtttaaataatattatacatatgagtgtggtgcttaacaaattgccttaccaataacaagtgcctaactaatgttattaatgtttcctattgacaatatttttacctaccttagtaaaactgaatcttagaaagtgagttaacttcttccaggacatacaggtttctagacatatgctgaatcactgtataataacaaaatacctatgtaattgataatatattagaaatatacctttaaataaagccagtaattataatgaaataagaaaaataccaaggaagaaaaaaatgcttgtctctctatgttcaagctggtaaaattccatcaaaatcaagctaatctcaattacccaaatactctgtcctcttgtttgatagtctgtgtgtgcatactcctttttattctaatataatagtgaaaatattaagcttaccgatatgtaaatagcccccaattatattgtgtgatgtcatgtttgtaaagcacacattcatttactaaaattattcattgtttattatttatagctattatttctactaataaaaagcatttccacacatgagcaaatgtatcaaaaaaagtctaagaagatgatcagattgatcagtgtactctatgcccttcttaatagtaactgagtgtgattttttacattgcatactgccagaaatcaccacatgtagcatggcagatggctgccaatagtcttgttatcctttcataaattatgtggcatttatgccattagggtgatttttcagtttagaaaagacaactaagggtcagtcttttctatgataatggactcacaagggacctcaaaactttaccatgaacatattttatatcttaagttatcttccagagactttgaatgtttgaagctggttgaggtcgggaagtcaggacagaagagggagtagagcacacctgctctaagtataggcatttcaacgttcagaggaaattagtgtggcgtggaggggcaccaggggtggtagagagttcatgctgtgctctctcgaggttggattctacagaagctcagcgttggtgtgattgttggttagtctggtgtggtttggtttggttctttagtaggtggggcccctaagaacctgagtaatgtccccatgcactagttctgtaaacgcggaagcaggtggtggcagttaagtgactcacactcatttaggctctaagccggccctctcattcaatatccagcaattcgatttctactgttgggtttacgttgctttgctagtctggggcctgcttcgaagtgtcaaaatagcagtgccattgttcgtggtgaatttccagcaaaagaaacagacagaatgttttagcaccaagttgtgtgatttgagattaaaatgctctgcatggctattcctcatgatggcacttttgagtgattactacaagaaaaacgaactgttaaaatttgaaaaggggaaaatgttggatacagctcaaatgatccatatcaactactcagttattcacctgtgttaggtatttcccaacttttcttggggtatcctttatagagtagcctttgtcaagtctcataaaaacagaactaatatacttccacagtatgcagtattaattttatatttcgatttgctctgaaactttgttctctcttgagactaacaagtaaatcataaagtgaatatttttcaatgtcgaagttgttctgaaagtataattttaaaagttctttcgggccataatatatgcctttggagaagttaatatattattgaaatatctacttatttcatctgccacatgaaaataggactgtttcatctgtccttaaaagcaaggtggaatatttgcttcttttgaaatgtctgtggcattttttttcttttgcatattctgcaacacaaagaaatatttaggacttgaaagaagaaggtgagctgcttgattacgctgtactagcaaactgtgaatttatgttatttacaaattataattaaaagcctaagaagaaaatgcatgcattattttatttaaagaaaagcctctgcataaaaacactcatggaagagttattttcaatttaaaaaatagatgattatgtgtaccataaaatagatgatttcatgtaccataaactactatagtaatttgccaagagataagaccaaggttaattttttttcaaaattaacttttaattacaatttaaattaaatcactttaagtaaaatcataatttaaaattattcttttaatcaaaaggtttttattttaaaaataaacatgtagaaaagaattatatatacttaatatttaattctttaaaagtttactgaaaggtcatctagttacttcttaatgagcaccatatttaaatatatttataatgaggtttgggtttttttattcttttcaaattaggtttaaatatttttcagttaaatttggtttttgcaaactacattccttgcacatcatgaggctaaagccagatatgtgacataatataagaaaagcatcctaagagagaaaacattctcaagctctaaaactataaaactttaagtataaattgatgataaatgtcacattgttattttaacattttttgtctgggaattctatgaagaagtaggtgcaaaatgttactatgtggaaaatgtaatgtactttgtgcattgaattttaaaatgacatggaaggtctgaagaacacagaaaggttgacagctcaccacagatttattaagtatattcaggtttttatctcaagatttttttaattacttgagtgttggtattgataaatttgttgttgttattactgagaacttaatatgttactatgtagatttcctaagttctctttcaatattactactgaatttgtaaatgataagtgatcatgaaataaacttatatgttgaacaatatagaccatatcattcacaagtattagggacatttcattatgggtaagaaatataacctttggacgtgtagaccttgtagtccatttcagtttgactaatcaacatgttcagtttataacatgtttgatcctctatatctctaagaatatatgtgtttttgtgtgtgtacatatgtgtgtgtgtaggcagattttatttagttgatatcatggggaaatctgttgctcacatagttgacatttctttataaatgcaactcacctcatcaaaatgacataccaaaagaactttaagaaacacatttgtaaatggcttacatattctatgctttcttaacccaaccacagtgtaaaaataattctgagtactttggaacataaccacaaacacttatcaaatatatgctccccagtttgcaattgggtccctataaatccactgtaagttgaaaatatagttaagtcgaaaatgcattgaatacagctagcctacagaacagcatagctaagcctcacctaccttaaacatgctcagaacactgacattagcttaaaacaaggcaaaatcatctggcagcatgatccactatagtgtattggttgttaaccctcgtgattgcgtgggtgactgggagctttgacccacttcttcctcccagcatgtgagaaattatgataacacagactgcaagcacagaaagagatcaaaattcaaaatttggagtacagtttctaccgaatgagtattgctttcacaccattgtaaagtcaaaatatcataagttgaacccttgtaagttaggggtcatttttatgctattttaattatgattgcaatgaccaatcaggtctgtggagctgttttttcccaccacaaaatggcttaagagtgctgtattttgctatcttttcttattgatattagaataactttttgactgttgacacttaaatttaaaagggtttctaaaaatcaatgagaaagattatggaagatgtgtttgtattagaagatgtagcaaacttccatttgaacaaaactctgcccaccttaagagtttcttctgtgtttatgattaatttgcttcaagatttctgtttgtggctgttgagttatcattctttttttttctcagtgtgctcattccttcattcagtcagttattttaaaaaatattaatttgttgcacaaatgtaatatgtctttgtataagacagacctaaattcaactaagggaccctatttaagaagtttgtggaaatagaagtgtttttaaggtccataaacatcagttttctcatttgtaaaataattggggcaataatacatgcttgagttcatagaaagtacatagcacagtgaatagcacaatttggggggtatttaacaaatgtcagtcatctttgcattatctttgtatgaaattaacatgtaattcataagcagttttaggtatctagcatttccattagctccagcgtccagtcaaagccctctgttggaatatctttgcagctacaggagtctgacttgatcaaatgtaacactttcatacctgtgtccctcccaccctttcatttgcttgactggcttctttgtatcagactatgactcaatggatttttccttttctattgctgaagaaagctccatttccaaaaattccattcaacaattcactacagcagacgacttataaaagagaaaatgagatatcatcctgtgttttcaagagtagataaagaagtagtagggttcttgcacagtcccagggttgatggcagagtcttcttcctgttcaatgtctcaagtttcatctgtccatctcctattcatgcacactgatgccatcctctgccatgctccctcatcacacttttgccacacgtgtctgtcctgaggcatctaatgtctgtggcaagtaaagtctcagaaccataccatgaagatctatggtgaatgaaataattaggtagatactaagacagagcatttaaaatatattctcatatattaattctcattcttagccattaaaatatttgtacttcaagtgttcggcttgaggttgaaaaatctgaaggactgacagcatctctcattatttcttttgggtagttaataaatgcttggatttcagttcttgatagggacaaacgatattttgttgataatggatcttcacttaaatcccatcatgcaatttactctctacatcacaaacaaccatgcgaagaaagaaaaagaatcagtgatttttctcttccctctaaggaagagattttcatagcggaaacaaagggaatattttggaaatttactgtggtgattttctggattattatgaagggggtggtggctgttgacatttagagggcgaaaatcggaaccactagaacatcttgcaatctgcacgtctggcctaccctacaaagaatttcccaccacccagtgactgtaggtttgtgcaattgcaaaatctctttacaaatttctgaatctggaaacaaactcaaatttgtatgtagatacaaagtatattgcatagttttaatgtgcactaattttctaaatataactacagtgtcagtggaggaaacgtactttgctcaggtcacaactgttttcaccatttcagaaagtcacagataccaatgctgctcatggtgtctaagtggcacaaagggcacctgtgtgtcagcctacatttgtcgttgttatattgaaggtgattctaggtgtgagtaaaacatctgactacttgattatgtcttctaatgtggtggtgcttgaatgtttacatatcaatatattattcgtgtagatcactatccttttattgcattgaaacaatgtttaaattttgtgtgtagatagactgtattttttatggatttacttcaggctgagggacagattgttctggtagccatttgttacttggttgtcaagaagcaagctaggttgatggtgaaacactataagaaatatagttttcattttctttaacatttgtatataagtgttctatatttaaataacaattacataattaaaagttttagattcacttgtgaattatttattaattgtaagattgtacctttcaagaaaactcaaccttattttttcctactttaggtggttttcttttcaagcattaaaaataatgttattgagttctattgatgaagttaaaaatctgatttccttttattttataattcattaggcattattacattttcactaaagttgcaacttgaaaattcctgtaagacacgcatcattccatataagaaaaatgtaaaattcaaatattgtgcaactcaaggtaaatttacaaaataaatttagtaagcattattaaagactcatagcctttaggttactaatatttaatattatagtccaccaggaaagatgatctcaaagagggctcagtattgatttgcttgttggtatttcagagatactgacagctgctatgacttctgctgttttttcttaactttgcccatactgagtttgctttgtatttccttgttattaacccacatctcaccatattgcaattaactttcacaataagcactccattgaatatattagaaatatttgcaatgtgaatagaaactcttaataagagcaggcctgctgctagatgataagaggtctgcatgaattagaaaaagttgcccttccatatcctgaacagatgtagccccaaagttcaggggttagtgaagagagggcttctttcttcactcccctcattcttttcctctggggagacactgtctttcacaacttcgtggacagcatgtggactaaatttcagacagacacttgccccttcagtgaggcatctttgtgcaaggtacaaactttatacacaggcatgatgatccctaacacaaatgtgtctatgaaagaaaagagaaaaataaagaacacccaagttttcatgaaagagcagttatacaggaatgaaagaagctttctaacaagaaggaaacagttgagagggaggaattaaagatagaaaaatctattgatagccaatctaatttccctgtttttaaaattcaagggtgattcactctaccacttatgagcagaaaacaaaccttagaaatagattacatgattacgatctatgtaaactttcacttcgtattaccctaattgggttctcttctaattctgtgtaaaataatacatcttttggtttatggtaagagagagccatcctactatgactgccaaattttgattattcccaaattgagagacaggaaggaaagtgtttacatttatcatattgtaaaatttgaaatatgtatttatagcccattttagaaatgtttcaatgtaagaaaatgacttttaaaaagaagtccaatgtctagaaaggcatccagtagttagtatgactgaagtacatagttagtttcttaagaactctgcctttttggtatttttccttttagggaataaataaaatcaagcctctcaaatgattttccaaatccagagccatgaagttacaggatgatggattgctaggctgccattgttatctgtgtcaatggtggtcttggaatcactctgtgtggctctatgttgtggccctctctgcacctcctaaagaatgacttcattgctgtttgacttttcaaatttccttccaaattgaaaactcaagacatttttcttcacattttattttctttttattatgccagtttaaaagtctttgaaaataaagaactgaaactcaccttcttctgaagtcgcaagtgagcaaacagaaataatggattggactttgttaatgatatgcctaaaattagatgttaagttattaaaattttagttttccatgaataaggacaaaaacctcatttctaaaaccttgtcacatttaaattacgctgtctcatttgagtctccagaaaattatgtccagtcttctgattgtcactcctataaacttatttttatttaaatgacataacctccagaagtataaaatgttgaaattcttttcagaatgacttgcattatagcttttccctcctgtggtattgaaatactatgtttcatattagaatgttttcaaatatctactctcctaaatagattagttaatggtattgtgtttcctgaaataatctgtgtaatgaatacgaacatttctacaataagtttacagtcttcttactttagagtatcatagatctaaattctaatttatttttttttttgaaatggagtctccttctgtcacccaggctggagtacagtggcacagtcttggctcactgcaacctctgcctcctgggttcaagcgattttcctgcttcagtctcccatgtagctgggactacaggcatgtgccaccatcccaggctaatttttgtatttttagtagatatgggtttcaccatgttggccaggctggtcttgaactcctgacttcaggtgatcctcccacctcggcctcccgatatgctaggattacaggtgtgagccaccatgcccagccctaatttactttcaataagcaaaattacactttgtgtcacactttccccacacacaagctttttgtgacttcctaaaatatttatttatttatttatttatttattttgagatggggcctggctttgttgccccagctggagtgcagtagtgtgatctcagctcactgcaagctctgcctgccaggcttaagtgatcctctcgcctcagcccctcaagtagctggaaccacaggtgcgcaccagcgtgcctggctaattttcatattttggttagagaggggctttcaccacattgcccaggctgctcttgaactcctgagctcaagccttctgcctgcttcagcctccaaaagtgctaggattatagatgtgagctactgcaccctgagacttttaataaatttaaaaaacaaaaaatagaaaacaaacaacaacaacaaaaaatttcattccttcctgttcccaggctaaaattactcttttgagttagtggatgagtgtatgtgtaaaactctagcttactttgctattgctgaatgggctgttgttatagccattgttattcattgacatttcagggctgagactatgtcattctagaacttcgactcatactctcatgttaatttggtataaaagaaacataatgaagaaagtgtatttatctcattattatttgttgtgttgtttcttcctgcctctctaaatcccacttttttgtacaactaattttttctttcatcaacttttctattaacagcttttgactttataactgcagctaaatggatgataaaacaaaataaggtgtgacacaaagaatgaaacagtgaatggaagggcttaggtataatggaaggaaatgtcaggaagaaagtcccagatgacttttcaaaacttcagggttggcagtagctcatggtgggagagatgtaactcagttgatggatttgatgaattttgtccaaacgttggaatttggactggtcagatacaacagaaagcccccagacagtgactctgcaaaataaatatacaaaatgtgatcctgacattcagaaactcatctttttctgagatgctttaggccatttttcgtgattgaaagaaagcgacaacagctctatcccccgtgtccatgatcagagaaagagaaagaatgaagattcaagggccgaaagcgtgaccagctgagtcacatttgaagccttcctgaaagcctcactcagtgacttctctttaaacagctttagctagaatgatggcacctggcctctcttacttccaaattagacgagaacatactacattttagctgggcacattactatcccaaaccaaactggggtgctattagtaaggaaggaaaagagtagatactgggcaggcaattagaaatctttgcagcaagacattcgggaaaggtattatttagaaaagtaccaaagtctttttgtgtccttgatgtggattgaatagagtgagaaaaattgcctgtgtgccggtttcccagtggaggtacatggagaaataagaattgtttccttctgcatggtaagcagctctccttgtccaattgtcccctattactgaccatggtcccacagcaatatagttctatttctaggaatggactaggaaaaaaatcccagaggagaaactcccacactgatttctacttctaaaattcaatgtatttgtacctcgcgtctctagaaaaattgtgttttagtatatcagcttttgaagacagctgtacctaaatccagccatccaaatgggacaaaggaagcagactttcaccttcagaagcagccatgagtttgtgtctgctgcattgcactttcaatatctaggacagaatttcatacttattatataattacagtaatacaatttgttattaaatagttgccaaacaaaatagaaatacaataaaaatttaaaccactaacctttaaatgatatattttgttttaagaatattgttcagctcagatatcagcagattaatgatgagtacaactaaaccccaatcagttgaaagaaatgtataacatatcattttaagatctctgtagtaatttattttttaaaaggaacttaatatcgtggattttaaataattgaaaatattttttacacttggactaaatgttcagatgatttttattatgcaaacatcacatctaattaaagatatttcaatattatatttcaagacattcagtaaccattcattaagggctgaatattatatagtgggataaactaaggccatagaatatttatgtccccagccataggaagttcgccatttattggaggagataaacacacacataactgaatttggttttgatcttcctctgacctattctattaattcaataatgtaggcctaatcattattgatatactttattcttgtcaagatttgccacattatttgccttgaagttatttattgcaaagggatttgttctctttaatggatggctctgcattttagcatatgcgtttgtctttgagaaaccaccaagaccaccaggctaagacattgaataattaacttgacataatatttataaagtagtgagctagaaagttttgaaagattctattaataaaaatggttcatcaaatttcgggggcaaatgccttaaacatttattaatagctaaacaatatatgaacttttcctgaggaagaaaacatttcttcctaagtagtttctaagtagtaaagtctaatccagatcttgttatatgcactgtagagttcttttttcagaaaacaacattgcatagtctatatttctttttataggacaggcagctgcgttagtgaatgattcactaatggtgcgaagtctttctgtcaaacaaacacacagttcacttagttgggcttcaagtactttagtttttttcctaaacaataactgtctttaaaagaaagaagctgtgtaaacattgaatacagactttaatttaagacagatgataacccggaagtgaccacttctctttatcatcaaaataccgctgaagccccagtgattcaattgccaggaattcttctttgcttgaatttgatcattcttctttctctttaaaatactgttgttaagcactggatcggcaatgtggcattgtctctagggattgaattatgtttaattgggaaggaagcacactctctcttgtttttagttcataaagtaagaagactatcaattagtaggcagtgcagcccaattggagccacgctgcactacagacagtttggaggagattcatagtaacaaacaagatttaaaatacatgtcttgtgaaaggccattataggtggatggctgggtttttcctgtcttttcatgctgtagcagcattatattagaatgtgaaggacactcatatccataaaataatggctttcgtaatgcagatgattaaagtaggaagcctacccacttctatttttccctaggcatataccaggatcaaatttcaattagtgacctaggaactgcaggctctgtattctgttatcaatccctttagccagctagaatcaaagattcacctgtcactctagactctcagtgactctaaggaggatttagaatagacatctgctctatcctgttacgttgacttctttatactgtctgtctacaaaatgcattatgaatatacagtgaacattacaaatattctaaggtccattaggaaatttcattttctgtggacaaggattttaatgttaaatattgatagtgatttctgctaatttattgttgatttgctaaaccaggccattttacggaaaaattttaaatatgccctgttgatcaggaaccaatatatatatttttcaaagtgtcagaatggttaccttgaaatcatttttagatatgaattgcagaattcctagaaagaaaatatgctctcttataggactgtgctttatcaggaaatggcaggttatctagttatattttaaagataccaaatttgtttagtgcagattttacttctatagtgctcaccttgatgagcatcacaatgatgttcttttatttttaaaatgatgcattataatcccattagagcctttgccaaccagtaaattattaataagacgatgatcatgctaattaagctactttattagattttgatggattttgtgccagaaattatggtggggtctttgaaatatatagagtattttctcttagagcaagtcgtctagcatcattgaaaactttactgaaaactcttcattactcataacattgctcgtctgtttcaaaatgacacgatagtcactttcacagaaacataatagtatgcaattcaaatgtttaatttgctgctgcaaaagaattcacaatagaattctcaatgtggggttaattacatagtaatgaaagagtaaacctattgggaaaatgctctaagtaacattgctctgtttcctactgataaagacgtgcacgcctgatttattttttatgctgggaaattcagaagtaagagaaaaccttgaaaaggtatgcacatgaataataaagttttttatcatttgtcaacatgatgagaaaatgatgaacgtggataattattatattacaaaggctataatcacaaaatagtaatgtataagaatatagcattctattatacacaggagaacatgatacattaaaatcattgataacataatctaaggaaagacatcgctaatcagaacaaaaaaaggaagaagtaatagagcaggcactcaaaattgtgtccatgttttctacaaataatcttcaccctctctgcctatgagtatagtgttatattgctaggtatgttatgtttactccatatatgtcaaagactccactgggggaattgaacaatgagaacacttggacacaggaaggggaacatcacacaccggggcctgttgtggggtggggggatgggggagggaaggcattaggagatacacctaatgtaaatgacgagttaatgggtgcagcacaccaacatggcacatgtatacatatgtaacaaacctgcatgttgtgcacatgtaccctagatcttaaagtataataataataaaaaatttggaccacaaaaaaaaatatggtatcttaataaatatctcaaaacagttataagattgacaatatgatccctactttgttaggtgaagaaaatgacacttttaaaaacataaaaagatttcctgtatgataggattcaaattcatatttgtttgtttccaagggctttttctcattcattatcctatgctgtcatgtaaattaatccatgaatattgcagcttgtatcagaagcttgaaagttcacagaaagaatcattttctacctaaatttgcccatcaaatttgggtggacagtgacagcagcacagtgttaggcttacttttaaatgacattatttaggatagtgagaggataaacaaatagactaaaagaacagaacggagtccagaactagatccacgcagatatggccaattgatcttccaaaaaggcaccaaagtgatgtaatggagaaaggaaaattgttttaaccaccagacctagaaaacttggtatccatataggaaaaaaataaatcttgatacttcataccatacacacaaaagtaattatagatggcacatagacctaaatataaaatcttaagctcaaaagtttctagaagaaaatatagaagaatatttcctggacctgagctaggcaaagatttcatagaaacacacaaacagcattagccacaaagaaaaaaaaaaaaaaaaaaagaccagtcaggcttcatgaaaaacaaaacaaggaaaacctgtgctcttcagaattaaacaaacaaacaaaaacactaagagaatgaaaaagctaagctatgggagaaaatattcacactatatatctttgacaaagcagttgtacccagcatatataaagatgtcatacgaatcaattgtaaacagacaacacagtaaaaatgggggaaagatttgcactgtttacaaagataaatgtctgataagcacaaaacatttaatgtaataagttattagctaaatgtaaattaaaagcaaaatcaaatactattgcacactcactagaattgctaaaattacaaaagattaacaataccaattgttggtgaagaggtgaagtaactaaactcacatactctgctggttggaatgaaaaatcatgtaactttgagaatctcttgggtaataactgacaaagttgagcatatagtcaccctatgacacatcagtttcacttctaagtatttactctgtagaaataaaaacatgtttacaacaggacttgtaaaaatatgtttttaataactgtttacagagagccagaatatattgcctaacattatttttatatataaaggttacagattttttatattaattttatatctttgtagattttttatttcttttattttaatctttagatctactactatatcacctacataggggcaatttaactcctctaattcttatatttctgattttgattctataattccttttattaatactctcaatagaacattaaatagtattgttgatagtggcccaactttaggtagaaatctactacattttttgaattgatgaatgaaaaattattttagacaatgtggaatgagtcaataatgcttattaccatatatatatcaccactaatctttattattttttgtaatgagaatatttaagatttactctcttattagtccgttttcacactgctataaagaaaaaactgcccaatacagggtaatttataaaggaaagaagtttaattgatactctattgagcatggctgaagaggcctcaggaaacttacagtcatggctgaaggcgaagaggaagcaaggcaccttcatcacaaggtggcaggaaggagaagtgtgtgagagtgcaggaaaaatctaccatttgtaaaaccatcacatttcatgagaattcatccactatcatgagaactgcatggaggaaaccacccccataatccagtcacttcccaccaggtttcttcctcaacatccggggattacaattcaagatgagatttgggtggggacactaagcctaaccatatcattctcttagcagttttcaactatgcaatacattattattaactctggtcatcatactgtacaatacattgtgagtatgtgaatatagtactcgtacttattcttcctgtactaactcaaaccttgtaccctttaatcaatattcctccatttggtgccacccacccaatacatagtaaccaccattctactctctgctttatgaattcaattttttttttacattttatatataaatgagatcatgtggtttttgtcttcctgtgcctggattatttcccttagcataatgttctctaggctaatctgtgtgttcattgaagcgttatttgcaatagccaaaatatcgaatgcaatgtaagtgtccatcactgatgaatggacaaagaaaacgtgatatatatatatatatatatatatatatatatatatatatatatatgtatatatatatatatgtatatatatatatatgtatatatatatatgcgcaatggaatactattcagccttttttaaaaatggaggaaatattttgagaacagtcatctacaaattttattttaccatcattgtttaatttacattattacttagaatagctatcatcagaaagacaaaagataataagtcttggcaaggatgtggcaaaaaggaaactctcaaacgctgttgggaatgtaaattagctcagccattgagggaaacagtatggaggttactcagaaaattaaaaaaagaactaccatatgattcagcaatgtcactactgagtatatagtcaaaggaaataaaatcagtatgttgaaaagatatttgtacttttatatttattgcagtattattcactatagccaagatatggaatcaatctatgtgtccatcaatagatgactggataaagaaaatgtgatgtatatacacaatggaatacaatttgaacattaaaaataatgaaatcctgtcattttcaataatatacctgaacctggaggaaattatgttaaatgaaataagccagacatagaaagacaatcactgcattatctcactcatatgtagaatgtaaagaagttgctgtcatagaagtaatgagcaaaagctgtgtttacaggcgagggatggttggggtactgtggagactggggagatactgatcaaaggatacaaaatttcagttagatgggatgaataagcccaaggggtctattgtacaacgtggtagctatagttaacaatatattgcattcttgaaaaatgttgaggatggatataaggtgttttcaccagaaaaagaataattatgtgaagttatccatatgttacccagctggatgtagtcattccaccatgtatatatatttagaacatcatcttgtactgtgcatggtaaatacatacaattatatctgtcagtttaaaataagataaaataaaataatataattactttaaagcttgtgaaggagtcaccacatggacaatataacagaaaatctctgctagattgaactttgtgatgaacacgaagtacttaataaacatatttctttgatctgtctatgcatggatcaatctgttcctgttgaggaccttataacttcctactgctcactcaacaggaaattgttctgaaagtgctctacccatcaaccttcaatataaaaatatacattttatgatttactcccagagttttgcagtggcacaactttacacaacaaatttgatcaaaatagaaatacttcaatcaattttctttggcgtaagtcaccttggtacttgtcctcatagggtttcgtgtatttcacattgagttgcatcatagtaaaatcaaggtgtatatcattcctatttccatttcacaaattatggaaatgtttcatgttactggttttgttttgctatttatttcagtgttgcttcatggaaaattgaacatagtaattaaaaatgacaaaattttaaaaatctatcatcttgaaatttgtacaatgttttcatgacattattaacaaaactaattatcgagtacagttacacgttccaaccagagctatgttgaactagagtacacaggagagctttttagtatgaactgatactcacacgtaagaattgcttatattttaggaagcgtggccaaatttctatatgaaacatccacttttacaaagtctgactgtattgttgtttatttggaaatagtagtcaaactgtaacaaaggtggaaaatcttttgcacggctgttgagaaatgggtggatcacgtagaataaggcttacaaaaccactagtgggttagcagccccaaacatctgagactatcagtacaaggaagaaatctctatttctgtagcctctgatttgctctatctcatatggagggcctaatgaaggaaagaaactgcattctaaatgatgcagagcaaataccctaaaagggaagtgcttggatctttattactttggagacctaaaagacaatgtactttgaagttagtttcttctggttaatctcttttacttgatgtagacacattacataaatccattgtcgtatgaataatacgtaacagcaataatctattatcataatgtttttaggtattcataaagtacattttctatgtctaaaggaaaagtagcagattattaaacttccagttttattttatgatctgctctgcctcttcaattcattccacctttttgttttgttttgttttttaaatacattcatatgaatgtatttttcaatttcttaccaaagaagcaatttggaaaacactgattgttcatttcccttttacctccttgtttcaatttatgttttgagtacagtacattagtttatagagactgtgattgaaaaaaaagagcttacaatcttcctcagatagctttgctctgagttttacaatggatggtttggaaaaatagtgtaataatgactgagcttctaaaatagtgaagtaacagttatttttgtgatgtaatatagtgatgtatatgtggctcaaaagggttgctatatattccccccaactccaattttatttttaatttttggttgtttttcagttttatgcaagacttgctatacctaattctacaagctatacagtgttttttaatattgattccagaatttgtttcatcatatgcaccagaacaaatacttcagtaaaacttcttctgcactttcttagacaaagacagcatgatacaggcacagctaagtctcttaagctcttaggtatccttaaaacattgacaaggaagtcaatattgaatttcagataacaactggaattttgacagtactcattagttagtttggtctgacccaggcttccatcagtgcaaactttatgccccaagagtctcacaaagcatttacagcatatgctacagaaacatagaaagggagcaggcaactggcagagtatgggcatgaggctgacagctcagagatgccactggacctgcctcatcagctctctgggcactactcactcttctgaaagtatttgaaaccttttgggctgttactttacacctggtaaaaagcatctatagaccagaagaacctgggaagagggtattccttcccttcagagccaaaacagagagttttatactcttcagggggtttccttcacaagacagttactcacaaatcaacgatattgaaattgtatatctgggatttgccctctactgtcactcatattgttcataagaacaggaacagataatatttattggtttgcaaccacacatagatataaactctaattgcttcaacagagttttatggtaagaattgtttagtactaccatttcacagatgagaaaattgaggctttgaaagcctgaataatttgtgaaaagatacaaagctcctatgtggtcagactggaattttaatctacttgtacctgacattggatcctagactcttcaataggttacacttccttcgaactgggaaaaggtagcacaaatcatttatttttaaatcaccgatactagttttgttgtttaaggcatttaatctaagttgacttccccaaaggactgtgcagatgttttctcaaattaaagtgatatttcagaacaacaagtactagaaaatttaattcaactaaacagtaaattctagaaactgggggatcttttggcctctcatacaattttattcgtataactatgtgtcccggccagtcatgataacatatacttgttcaattgataaaaactgaactgaattcaagtcatagacttactgtagaggcttgggcacatttgcagaatatacacttggaatatgcaatgaggaatagaggttaagaagaaaggaaataagtaattacataagtaataattatatagtaattacataagtaaatacaattataaataattgcataaaacaatatcattattattattattattattattattattcgaaatggagtctcgctcttgtcgcccaggctgaagtgcaatggcgggatcttggctcactacaacctcctcctcccaggttcaagtgattctcctgcctcaacctcccaagtagctgggattacaggtgcccaccaccatgcctgactaatttttttttgtatttttagttaagatggggtttcaccatgttggtcaggctggtctcaaactcctggcctcaggtgatcctcccacctcggcctcccaaagtgctgggattacaggcgtgagccactacacttgggcgacaatatcattattataaatacagaaaattcctgtttttttatatcagtcatcctagaacagagacgctatcagctcctggggataactcttcccacatcgtctggaacataattatatttaattaaaacctgaagtggtatctaaagataatgacaaagtattaaatgtgcagagggtttcagtctctcaaacaaatgtgagtttgttactatgttatgtaccatagtagtctaagggctattatgttgtttcttacattagtgtaaccatggtgaaaaccaaagagaaaataaagaatgattgttcatgttttaatgtataagagcacattgatacattgtaaaacacccagatcagttatttaatccatcttttgaaatcacagaagaaaactggtgatatacatgtgatgaggaatggcaactgtagtgatttatattcctctaattttttgcaaaaaaaagaaagttcactgaaaaaattacaactttcgcctatgctaaacttaatttatgtaaaatagtggtcacagctattaaattattgttatttattcacaaagttctcctctacatattgttttaaagtaataactgctttacagcatttttttttaaatggagtctcactctgtcaccaaggctggagtgcagtggcacaatttcggctcactataacctctgcctccagggttcaagtgactctcctgcctcagcctcctgagtagctgggattacaggcacctgccccacacctggctaatttttgtatttttagtaaaaacaggtttcaccatgttggccaggctggtctcaagctctggacctcagataatccacccgcctcgacctcccaaaagttctgggattacaggcatcagccactgcgcccagctgctttacagcatttttatagacgctcttctttgaacttactaagagttcattgaaatcagctgtgcagagtttaaatccagcaaggaaattcaggcacagacaggttggaggtaacaaaaagtaaaactggaaagtgaatcaaattttggctgaaaatttaatatatttaatagtatgtatgattcctcaatctaacttaggttaaaataatcaaaaataaaataaggtgaactactttttttttaatgggcaaggtggcagaaatggaatttccaaacatctagatcttaggtctttattattctaagcaatttttaatacaatttgagaatctttatttctgtactcttcttcaataataacattaaagcagaaggaggttccaagatggccgaataagaacagctccagtctgcagctcccagcgtgagcaacgcagaagatgggtgatttctgcatttccagctgaagtaccggcttcatctcactggggcttgtcagacggtaggtgcagcccacagagcagggtgggacattgcctcatttgggaagcacaaggggtcaaggaattccctttcctagcaaagggaagccatgacagatggtacctggaaaactgggacactcccactctaatacagcgcttttccaatggccttaggaaatggcacaccaggacattatatcccgtgcatggcttggagggtcccatgcccacagagcctcactcactgctagcacagcagtctgagatccaactgcaaggtggcagcgagactgggggaggggcgtctgccactgctgaggcttgagtaggtaaacaaagtggccaggaagcttgaactgggtggagcccactgcagatcaaggaggcctgcctgcctctgtagactccacttctgggggcagggcatagttgaacaaaaggcagcagaaacttctgcagacttaaacttccctgtctgacagctttgaagagagtagtggttctcccagcatggagtttgagatctgagaatggatagactgcctccttaagtgggtctctgacccccgagtagcctaactaggagacacctcccagtaggggccaactgacacctcatacagccgggtgcccctctgagtcgaaacttccagaggaaagatcaggcagcaacatctgctgttctgcaatatttgctgttcttcagcctctgctggtgatacccaggcaaacaggttgtggagtggacctccagcaaactccaacagaccagcacctgagggtcctgactgttagaaagaaaagtaacaaacagaaaggacacccacaccaaaaccctatctgtatgtcaccatcatcaaagaccaaaggtagataaaaccacaaagatgggaagaagccagagcaggaaagctgaaaattctaaaaatcagagcgcctcttctcctccaaaggaacgcagctccttgccagcaatgggacaaagctggatggagaatgactttgatgagtttagagaagaacgcttcagaggatcggtaataacaaacttctctgagctaaaggaggatgttagaactcatcgcaaagaagctaaaaaccttgaaaaaagattaaacgaatggctaactagaataaacagtgtagagaagtccttaaatgacctgatgaagctgaaaaccacggcatgagaactatgtgacgcatgtgcaagcttcagtagccaattcaatcaagtggaagaaagggtaccagtgattgaagatcaaatgaatgaaatgaagcaagaagagaagtttagggaaaaaagagtaaacagaaatgaacaaagcttccaagaaatatgggactatgtgaaaagaccaaatctacgtctgactggtgtacctgaaaatgacagggagaatggaaccaagttggaaaacacttctggatattatccaggagaacttccccaaactaatgaggcaggccaacattcaacttcaggaaatacagagaatgctacaaagatactcctcaagaagagcaactccaagatacataattgtcagattcaccaaagttgaaatgaaggaaaaaatgttaagggcagccagagagaaaggtcgggttacccacaaagggaagcccatgagactaacagcagatctctcgacagaaactctacaagccagaagggagtgggggccagtattcaacattctaaagaaaagaattttcaacccagaatttcatatccagccaaactaagcttcataagtgaaggagaaataaaatcctttacagacaaagaaatgctgagagactttgtcaccaccaggcctgccttacaagagctcctgaaggaagcgctaaacatggaaaggaacaaccagtaccagccactgcaaaaatatgccaaattgtaaagaccatcaatgctaggaagaaactgcatcaactaatgagcaaaataaccagctaacatcataatgacagaatcaaattcacacataacaatattaaccttaaatgtagatgggctaagtgctccaattaaaagacacagactggcaaattggataaagagtcaagacccatcagtgtgctgtattcaggagacccacctcacatgcagagacacacataggctcaaaataaagggatggaggaagatctaccaagcaaatggaaaacaaaaaaaagcaggggttgcaatcttagtctctgataaaactgactttaaaccaaaaaagattgaaagagacaaagaaggccattaataatggtaaagggatcaattcaacaagaagagctaactatcctaaatatatatgcacccaatacaggagcacacagattcataaaacaagtccttagatacatacaacgagacttagactcccacacaataattatgggagattttaacaccccactgtcaacattagacagatcaatgagacagaaagttaacaaggatatccaggaattgaactcagctctgcaccaagcagacctaatagacatctacagaactctccaccccagatcaaaagaatacacattcttctcagtgccacatcacacttattccaaaattgatcacacagtttgaagtaaagcactcctcattagaatcaaactagaactcaggattaagaaactcactccaaactaaacaactacgtggagactgaacaacctgctcctgaatgactactgagcacataacaaaatgaaggcagaaataaagatgttatttgaaaccaatgagaacaaagacacaacataccagaatctctgggacacatttaaagcagtgtgtgcagggaaatttatagtactaagtgcccacaagagaaagcaggaaaaatctaaaattgacaccctaacatcacaattaaaagaactagaaaagcacgagcaaacacattcaaaagctagcagaaggcaagaaataaccaagatcagagcagaaatgaaggtgatagagacacaaaaaacccttcaaaaaatcaatgaatccaggagctggctttttgaaaagatcaacaaaattgatagactgctagcaagactgctagcaaggctaataaagaagaaaagagagaagaatcaaatagatgcaataaaaaatgataatggggatatcattgatctcacagaaatgcaaactatgatcagagaatactacaaacatctccacgcaaataaactagaatatctagcagaaatggataaactcctggacacatataccctcccaagacttaaccaagaagaagttgaatccctgaatagaccaataacaggttctgaaattcaggcaataattaatagcctaccaaccaaaaaaagtccaggaccagatggattcacagccaaattctaccagaggtacaaagaggatctggtaccattccttctgaaactattccaatcaacagaaaaagagggaatcctccctaattcattttttgaggccaacatcatcctgataccaaagcctggcacagacacaacaaaaaaagagaattttagaccaatatctctgatgaatatcgatgcaaaaatcctcaataaaatactgggaacccgaatccagcagcacatcaaaaagcttatccaccaggatcaagttggcttcatccctgggatgcaaggctggttcaacatacacaaatcaataaacataatccatcgtataaacggaactaaagacaaaaaacacgtttatctcaatagatgcagaaaaggcctttgacaaaattcaacagcccttcatgctaaaaactctcaataaactaggtattgatgggacgtatctcaaaataataagagctatgtatgacaaagccacagccagtatcatactgaatgcgcaaaaacttgaagcattccctttgaaaactggcacaaggcagctatgccctctctcaccactcctattcaacatattgttggaagttctggccagggcaatcaggcaagagaaagaaataaagggtattcaattaggaaaagaggaagtcaaattgtccctgtttgcagatgtaaaatacctaggattccaacttgcaagagatgttaaggacctattcaaggagaactacaaaccactgctcaacgaaataaaagaggacacaaacaaattgaagaacatttcatgctcatggataggaagaatcaatattgtgaaaatggccatactacccaaggtaatttatagattcaatggcatcaccatcaagctaccaatgcctttcttcacagaattggaaaaaactactttaaagttcatatggaaccaaaaagagcccgcattgccaagacaatcctaagcctaaagaacaaagctggatgcatcacgctacctgacttcaaactatactgcaaggctacagtaaccaaaacagcatggtactggtaccaaaacagagatatagaccaatggaacacaatagagccctcagaaataataccacacatctacaaccatctgatctttgacaaacctgacaaaaacgagaaatggggaaaggattccctatttaataaatggtgctgggaaaactggctagccatatgtagaaagctgaaactggatcccttccttacaccttatacaaaaattaattcaagatggattaaagacttaaatgttagacctaaaaccataaaaaccctagaagaaaacctaagcaataccattcaggacataggcatgggcaagggcttcatgactaaaacaccaaaagcaatggcaacaaaagacaaaattgacaaataggatctaattaaactaaagagcttctgcacagcaaaataaactaccatcagagtgaacaggcaagctacagaatgggagaaaatttatacaatctacccatctgacaaagggctaatatccagaatctacaaagaacaaatttacaagaaaaaatcaaacaaccccatcaaaaagtgggcaaaggatatgaacagacacttctcaaaagaagacgtttatgcagccaacagacacatgaaaaaatgctcatcatcactggccatgagagaaatgcaaatcaaaaccacaatgagataccatctcacaccagttagaatggtgatcattaaaaagtcaggaaacaacaggtgctgtagaggatgtggagaaataggaatgcttttacactattggtgggactgtaaactagttcaaccattgtggaagacagtgtggtgattcctcaaggatctagaactagaaataccatttgacccagcaatcccattactgggtatatacccaaagtattataaatcatgctgctataaagacacatgctcacacatgtttattgcaccactattcacaatagcaaagacttggaaccaatccaaatgtccatcagtgatagactgaattaagaaaatgtggcacatatacaccatggaatcctatgcagccataaaaaaggatgagttcatgtcctttgaagggacatggatgaagctggaaaccatcgttctcagcaaactatcacaaggacaaaaaaccaaacaccgcatgttctcactcataggtgggaattgaacaatgagaacacttggacacagggtggggaacatcacacactggggtctgttgggggtttgggggagagaggagggataacattgtgagatatacctgatgtaaatgaccagttaacgggtgcagcacaccaacatggcacatttacacatacgtaacaaacctgcacgttgtgcacatgtaccctagaacttaaagtataataataaaaaaattaaaaataaaaataacattaaagcaattgaatgtacataataatcagtgacaattttctagtataaaattttctttgttacattcttcatcagttctcaaaatatcatctaaaaggaaagggtgagccagacgaggtggctcacacctgtaatccgagcattttgggaggttgaggtgggaggatcacctgaggtcaggagttcaagaccagcctggccaacatggtgaaactccgtctctactaaaaatacaaaaataaaaatacaaaaccccatctctactagaaatatcacattatatatatctatatatatctatctatatctatatctatatatctatatatatctatatatatctatatatatctatatctatatatctatatctatatctatctatatctatctatctatctatatatatatatatatcagggcgtggtgacagacgcctgtaatcctggctactcgggaagctaaggtaggagaatctcttgaactggggacggggaggtagcagtgacctgaaatcttgccactgcactccatactgggtaaaaaaaaagaaaaaaaaagaaaaagaaaggttgttttaagtgtgtttgtaaggaagagggcagacaaaagaaagagatcattcaagatttacacaagattgtttttatttaggaatgcctttcttttgaaggtttataattggcgtttggttgagtttagtaagtgttccagacccagctctcttcagactgatggttcggaatccatctcagcctcatctccttttaccccagcctgtgacaagaagtgctttctctgaaaataaaaatcagtacacacagttctgttgatattatatttgcttctttgtcatatgtttaggtagaattagtggtaagttttctgagttttctcagtgtttaaaaaattcttccttaaaattggtgagtcaacatttatttccagttggactttgcagacatgttataggtgtataccttgaataactttctctttttaaggtttgctttctttcacgataaatgcagtaacatttgccctattaaatatgttctaagacttcattaaacacacactaaaaaacagaatcttaagtataggcattttctgctcatgtatcactcatctacttactccaagaaaagttgatcctgaagagatgaattactgttttttttgttttttctttttaaagttatttagggaaggcagtgtgtatttaggtaggtatgtacctatgtggttatttggttgttactatgttatggaccagccttctgtgataaattgtagagtttattttgttacgttgttgcagcaacttccttgacattattagaggggcagatttccatttcctgaacagcaacttaataacaactcttgatgaacttgaataccatcagtaggtctattctcagtttccttctcatttggctaaagaagtggtctcttccctgctttattgcataggcatgaacattgagttattttttcattgctttggacattgattctttctaatgacttccagtaggctacctttcagatcattcttctttatagttttacaaaatgcgtcatacattttaaacgcatcttccgtttctctatgtttcataaaaagacaatttgtgtttagatctcatctttctgggagttctttgaggcttatattcctaatctttcaggtgggaccagtcttcaggaagttattcggagtttgaaaagataagcagtttatgtgaagtgtgtgtgtgaaacaaccctaagttaaagcctaaagtaatctacaaaatagtatttttgtctctttgtatatatttctgtgaacattcacagtttggaattaaaatacggtgcccttacgaactataatctatgacaattatctttaaacgtccaagctgtgaagcagtagaaaaatctactgtgatttgggtaaacttttcttttcttaactttctttgttatcttggaaaaacataacatattactaatatatttttttaaaaatttgtcaatgttcagtaaagtacagaaggcacgcttttaaaataaaatgcttaatgtttaattcagcacaactaaaaaagaaaccaaagttttcttaattaaaattagttatgataattgtattatgaatcagcaatattcccaaaaggtggcatgcttgaaacgtggaatatgtttgctaccaaacagtcttaaaatctacaaagaaaagaggaatattattgaaagactcttatgacaattgtcttttttgaaacatttgtgcacattctaaaacaggttataaaagttatccaagtgtgatgctcttgattattaaaagctaaacatttcaagtcagtctgtcaattagtatttttgactgaataattgaaatctttttcagtaatgtttaaattgcactatggcttttccagattttatatgtatctaaatctgtatctatctgtatgtcttcaattaaaatccccactttattatgtcacaaaaatgaattaatgttggaaatatttgtgaatacataaaaactttatgtgagatagatacagcataaaacaaaagttagcaggttataatatacaaaaataaaatattttctttttggacctagcagcatcatttgtgtaatgcataatgataaaagatgcattaggtcatgatagttcccaacatgtattttaatggtatatcaacccttcttttccttgcagtatcatagtaatcacttgtgtgtatttgcatgttcaattttacaaaatcaaaacaatgtgtacctaatacctaatgtttaaaataattataaattataggtttattttgttactttgttgcagcaacttagcaacttccttggctcacattcccccacccctgtttttttggtggtggtgttcttgcttttgttttgagatggagtttcactcttgttgcccaggctggagtgcagtgggatggtcttggctcactgcaacctctgcctcttgtgttcaggcgattctcctgcctcagtctcccaagtagctgggattacaggcacccaccaccatgcctgggtacttttgtatttttagtagagatggggtttcaccattttggtcaggctggtctcaaattcctgacctcaggtgacctgcccatcttggcatcccaaagtgctgggattacaggcgtgagccaccacacctggccatatttcccccatttttaatcaatccattgctaagcatccaatggactgtactccaaaaagctaatttgttttgaaattggaatttgttttctatagactcagcagtaataacattgggtaaggtttcatactaacttcatgaacttacttaaatgataatgcaaatgaaatacacttaaaaattttctaatgtagcaatatacacggttgcatactagttattaatcactattcactagaaaataaacttggaaattaatgaacatttaagctatttttaaaaaacttactatgaatacttaaatccagccaaaaccccttggattgttaactctgtttaccttaaataagatcagaatcgagttagaagtggtcagacacagtggagcaaatctttctgtagaagaagaaacagaaggtttagaagatagcgggaaataatgcttgagcacccaagggctctgaaggcataagccaggtagtgaaagctcaaatctggtccaagagctgtgaaatggtaagaaattaaaaaagaagtccgaaaccacatgtgagtaacgtgaaagacatggaatgaagcaggcttcccacctgacatgtagggggaaggaatcaggcactttggagaatttcttcccagacatgaagctggggaattttaattgatagtgacaactgggcgcatagcagttgctctgtaaactcaaagagaaagaactttgtagaagtcttactaccaaccaacaagtacttttcctctttcttcaacagaccctgtaaccaaaccacaaatccataaatcatacaggtgaattcccatagctctagtatgaattacttatacattaaacattttacagataaatgacactcattgttggtcatataaatattacagtggacccatgttaagctattgtggaaacacagaagaagagactcaaatcaaattggagagaatatgaaagactttcagatggccacaatacttcagctgaaagttgaagagaataattttgttaatggcattgcagctgttgtgtgctgaggtattaatgagcccctacattggctcaggtgagaaatattataggattgatatgtagcagaaaggatgaagaggacataaactcaaaagttatttaagaatctaaaaatgtgtggttcagatgaaaaggagtttagaatgatgctttgatcttcttctagtacaactatatctttgttgttgcttttcaaagatacaaggaatacttgaggaggtgtatgtttgaggagaaagatactgaatttttgtttggacacagcaaatttgagttgatcattgcattagggttctccagaggaacagaactaatagtatagatgtatatatgaaggagagtctattgaatattgactcacacgatcacaaggtgaagtctcacaataggccatctgtaagctgagaggcaaggaagcaattacaagtcccaaagcctcaaaagtagggaagccgacagtgcagccttcagtctgtggctgaaggcccgagattcccctggcaaaccactggtgtttcagtccaagagttgaaaagctgaagaacttgacaggagactgatgtttgagggcaggaagaatgcagtatggggagaaaaatgaaggctggaagagtcagcaagtcagctccttccaccttcttctgtctgctttattttggctgtgctggcagctaattacatggtgcccacccagattgagggtgggtctgcctattccagtccactgacttaaatcttaatctcctttggcaacagacacacccaggaacaatactttgccttcttcaatccaatcatgttgacactcaatattaaccatcacagtcatgtattatacatgaaggaaaatttaatataatattggaaatgtatgctcatacattccctatcctatagataatgtaaggactcaatattaaccatcacagtcatgtattatatatgaaggaaaattttatatcatattggaagtgtatgctcatacattccctatcctacagataatgtaaggacagagactcccgttattttttctatatgttgaaagagatcttcccaaccctgcccctgtatgtaccatccttagatttctctaccacagattgtagccagtctgtttttctccagttgttcagtccaagaatatgaggtcttatttgactcttctctcctgctcacatttacttgaaagtcctgttaatgctacctaacattacatctggatttcaaacacttctctgtgcatccactttctcactcctttcaattcattatcatttcaaacctgaaatattgcaatgacctacccaatggtttaccagcttctagcttttacccaagaactattttcaatgtggcaaccagaatgaccccttaagtaaaagtcaaattatatcacttctctgctcaaaaccctgaaatggctgtccatttcactcaggatacaaaccaatgtctttaaagtgacttacacaaaatgcctacattacctcttccctcataacctactattctccctcctgctcactcagctccagccgcagtggcctttttccaggctttcgtacatactgtcatatttgaacctcaggacctttgcactggctgtttcatcttccaaatatcctcattagcagcacctttgccactttctgctatcagttcaattatcactttctacgctctgttcaactattctatttagaaatgcaatccaaccaagcacttttctcttctccacattttcttttccagatagaattctaacttacccaatttatttgtacatttttcctactgtctctgctattagaatgtaagccacatattagggatatttatctcttttttccacagaggtatgtcaagaatctaaagtagtacctgacatatagtaagtgcttgataaatatttttacagctttaggagataaaattgagaaatgaaaaatgtctatattgaaggcataatgtgatgatttgatgcaaatatacattgtgaaattattaccacaatcaagctaacacattggttatctcacgtagttaccttattttttgtgatgagaacacttaagatctattctcttagcaaatttcaagtatacagtatagtataattaactataggcaccatgttgtacatttgattctcagaacttattcatcttaaaacatttctccatttcccatacctctgatcccctgacaaccacccttcttctgttgctgtgatatgatttttttttttagatttcacgtatcagtgaaatcacatagtatttgtctttccatgtctggtttattttatttaacataatatattccaggttcatccatgttgttgcaaatggcaagatttccttatcttttaaggttgaataatattttattatatatatcattgtttctttattcatttattcgtggataggtacctagtttgttttccatatcttagctactgtgaataacgctgcaatgaatgtagcaatgcaggtatcacttcaagatattgatttcatttgccttggatatatacccaaaagtgggattgctggatctagacttcctttcttttctttttttttttttttttggagtggggtggtctcactctgttgcgcaggctgaggctggagtgcagtggtgccatctcggctcactgcaacctctgcctcctgggttcaagcaattctcatgccacagccttccaagtagctgggattacaggtgtgcaccaccacacccagctaatttttgtatttttagtagaatggggtttcaccgtgttggccaggctggtctcaaactcctgacctcaggtgatctgcttgccttagcctctcaaagtgctaggattacaggcattagtgaccgtgccaggcacaatagttctagatttctgatgaaactttgcagtgttttccataatggctgtaccaacttacattccaaccgaagggcacaagggttcccttttcttcacatgcttgccaacatttgttattactcatctttttgatagttgataaatacttgttgtattaaaaattagatgttgaatatcactagttttttttttacaggtgcaagccactgcacctcaccactaatatttttaaatatggtttttgtggtcatatgttaacatagaaaatatgaaaatattaagaaaactaatttttaaaaaattgaagaagaatatgattaggttgagttaaatatgaatggcttttagagctatgcaaacaattaaaactaactgacaagagagaatttgtaaagagattaagagtgattcataagtgctgggtatggtggctcacacctgtaatcctggcactttgggaggccgaggcaggcggatcacgaggtcaggagttctggaccagcctggccaacatagtgaaaccctgtttctactaaaactacaaaaaattagccagacatagtgttggctgcgtgtaatcccagctactcaggaggctcagggaggagaatcgcatgaacctggggggcggaggttacagtgagccgagattgcgccattgcacaccagcctaggcaacagagcgagactccgtctaaaaataaataaataaataaataaataagagttattcatatgtgtggatattcacctagcaagggaacagctttctggattttttgtgtgtttgttttttcattatattctgctatactgagtagagttttccattaaaatttttcctgattattatcaatggacaatcaccaatccttcttagctttaaataacctctctaggcaaacaagaactaagtagaaaaaaatatatttgagacaaaacaatattttatagtatagttaggtaattattgcgtttggtagtttttgcaaatttaattgtatttctttgagcctatttctttgatattcgttatttagaggtgctgaaagagggaagcaccaaaatgaatcacatatgacaagtatacatacaagcaggtttaaaaaaaaccagcaaaatattttaaatagctaaataattttctatttgtcatattttaaatctcacttaattataatcattataggttcaaggtttgttttaatcaactcaagtaatattttctggaaagctatgagcaagtgttttatgaattctaactctttggtatcaaaaacacaaattggcctgtttcgtttttcatcatgcatcaacaccagtttgggaattttctttggccaaaatttctattaatatgtaaaagaaaagatgtgttttcttaaatgctctggaaatagtatcataaaacatatataatgtgtaaatttaataaacttttaaaaatattgaaatgaacatcatatatttttgaatgatgtgttgatatcttaaatagtgctacagaggtaacaaagtttaaattaattaaaattatattcaccttgaatatggaatctatttcatgtcattaattcagctaaaaattagaaactaaataaattatattattgaaatttaaaacattgtagaaatttcaaaaaatgacaaatttgctttgtacctttatttcttctacaaattcttaaaaaatgctcttagtattttttttttttttttttttttttgcttatgatttaaaatatgatatttactttggaagtttcttcttttttttgttaccagttcgtgttatttcttgggttttctttttcacctaccatccttgtatttcttacaatttgcttctgaaaatacctatttcttctttttaaccaaatagctcaaggctgggataggatgcctcccaggaaacatctggcaatatttggagaaatgttttgttgtcacaattctggggagaggaatgctactgacatctagtgggtggaggccagggatactgctaaatatcctactgtgtacatgaccacccccaaagcacagaattttccagcccagcatatcaatagtaccaaggttgagaaattcttattgaaacatacactgcgcagccaccttagtggtccagatttctctacattccaaaaattttattgaatttattctcctttttgaccacaaaattcctgatttttctctcctctttcttgttttcatttctcagattaatgattctgactatgatgtgattgaggggcattgcctttggaaccattcagttaccaccacactagatcttcaataattaattaagttctgatcattacgtgttttcatttctgtgtggataactggaggaatcttgtaattaattagcaaccatgtgtagtacagtgttaacacttgctagaaatgagtgggctctttcagaattctcagtttaagaactcttccttagtgtttttcaacgcattttgtttggaatacagacatgcaagatattctgcaggggaagatcatggtctgatagatctggaaaatgctgactttttggtcccaagaagctctgtgatatttaccaatgaacctgagaggtcctgaagtactaaagcctgcttagtttggttttctgcagctgtgtgtgtgttttttttctaataaaattgttttgtttcgttttaatcccttaaaattcctattaacatcaggaaatattgatataatcctatctgctttcacaagattctaaatgttcaaatctcctcaccagaacaagtagaagtaaatctgctcaaaggatttttaaaaaaaactggcatttttagtgaattacgtgcagagaactttatatttagttttaattttgttcagttaccttaagccttttttatcttattatacattattagagtaaatttacatttttatctaatctcatattaaggattgaataatacactttttgaagtttacaatagtgtacatattatatgtatcttgttttaattttctccaggtgtttttaataattgaattttccagtttgtttgctgtaaacattgaccatttagaaaataaattgatgtaacactatctgcttcctcaaataatccccctcacctccccccacaacacacacacttatatcttgcttgtgtagtttatagcatagtaaatatacatgcgtattttagggtataaggctaaattcaaatctgtgatgctatatgccatatgtttcctgacctatttgacaaatttaattgccccttaaagtttctattgcttctgtaatgttataacttattttttgtaatagttggtatatttattttctttacagaacaataatttccatgagaactaggactctaaaaattgctcagtactgtatggtatgtcatatagagatcctgacagaatgccgtacatgcaaatatactcagcatgtgttagttgaaaacagatgatgagactcctaacttgtagtagcatgtaatctatatgtggataaaagtgtgctcaagcagtagctattaccaatgcacagctctgaatgactaaatatctcaatcaagaatatcgacaataaatccaggagctgtggctcaagcctgaaatctcaatgcctagggaagctgaggtgggaggatcatttgaagttaggagttcaagaccagcctggccaacagtgataccctatctctacaaaaaacaaaaataataaccagagatggttgtgcacatttgtagtcccagctattcaggaagctaaagcaggaggattgcgttgagcccaggggaggacgcagtgagctataatcctgccattgcactgtagcctgggtgacagactaagatgctgtctcaaaaaaaaaaaggaaagaaaaaaaagaaaaaaaacccaacataacaacagaataccgaatacccataataagaaatgtaagattctccatgaactccacatttttgggcttagtaacttgactcttaccacctaaattcaactcatttaaaactataggccaggagcagtggccacacctggctaatttttgtacttttagtagaaacagggttttgccatattggccagagtggtcttgaactcctgatctcaagtgatccgcccacctcggcctcccaaaatgttgggattgccagcatgagccaatgcacacagcctatagttttaaatgaattttgctgattctactataggctgggcgtggtggctcacacctgtaatcccagcactttgggaggctgaggctggcggatcacctgaggttggaagttcaagaccagcctggccaatatggcgaaaccccatccatctctactaagaacacagaaattagctgggtttggtggtgggcagctgaaatcccagctactcgggaggctgaggcaggaagaatcgccttaacctgggaggcggaggttgcagtgagccgagatcactccactgcactccagcccaggcggcagagcgagactcatctcaaacaaacaaacaaaaactataaagaaagcacccagaggaggaaataatcaataaattacatatttcctggacaaataatacttcatagatgcccccaactttcccattcattgctaaaatctcatcataaggttgtaaatccaggattacatggagcacaagtttcacagatgttgtttgactcattcattcattccttattcattcaatatgaatttattatattttaggtaccaagctatcggctgaaaccagctgttagaggatggagagtatccagattgttaaggaagaaatgggtagatcatctggtcagtagtaataatggtaatggatccccagaggcagagtcaccttggggaatataaaatgcattttaatttgaatcgataaggaggctgatattgtgaatcattaaaaaataaatttgaaaaatgtaaagtagtgacagaagcacatggtcaccaggcaagaaggctaagaggcagttttgaagccactgcaaggtattctttgaggaagtgaaggatgaaagctctgtgtttaggtttctggttctaatacatcctttaacaaggccatattgtaagagaatggttaaggtggggctgttcagttggagtgaaattgaccgttaatgatccatctcagtatgatgggcaaagatgtattacatgaacctggtatcagaagagtgtaatctttgtagctctcacctatgattacatgattgccattaattttagaatctacgtggaatcttaatgattgtgaatgactgaaaaccattaagaaaactttagagactttctggataaaatgcaatgactaagttattattcgatttatatgaataaatatattcttagtctttatgtgcttttcggtttccatatgcacaccctttagttctaagtttggattttcctctataatattacaattgctatttctttgtctgtctctctcttccctcctcactccattctttccagtatccttgtctatttttctttctttctctcttctttttctattgttgcatcactggccataaccctattgcagttgtgaaatatttagtggcctcagcttatgtccctagtgggagctatggaaagtacagaaaaatgaaaagtgactcacgttattctagtgtgtctctcactttccacagctacagttattgctacccttggggaaatttacatacactataaatagaaatatatactttagaaagacatttaaacttcttcttttacatgtcagaataaacaaaagtactagtaaagaaattatttctgcactaaataatgaattgatcctcataatgccctgtaggtatggcatattgagggacaaaaattataagtctgatttcaaacttctaagtgttgaagactcatgtttgataatttgataattgggggaaaaacagagcaaataattccctttttgtctatggatcatattgcctctcagttcctttagaaaaatacaagttaattaagcttagggactggaggcgtaaaggatagtaaaaggaagaaaaataatttagctttcagaagatcaagagtactaggggaagtgattttggctctcattttttattgaaataaaaattgacagagaatttggacatcctttggaaagccaggcaaaggaaattcagtttatcataaacaggataaaaatcagaatatccaattccctgggaatcagaaattctccatgaagctgaattctgcttcagttcatctctgactcattttgtcattcaaatatgtgggatacctactatgcaccaagcattgttttagctgccggagattcaatagaaatgatacggctaagttcctggcctccgtgaacccgacattctgatgtgactgctttattattagataatgtgtaagcaaatttgccattgtgtgttctaaattaagtaaattggatttaaaaaatttagaaagactatcttttggtattcttacaacttactatttaaaataatacaccatttgaaagaaggttttgtgcctctagctatagccacaagtggcttcatgccttcagaaggggtcagggaagacaagcagccaggaggcagtagggacagaatagttgctttgaatagagacaggtttagtccagttttgcctgagagggttagagatccattctgctctctgtccttgccatggattctgttgtctttcactccagccccttctgctcaacatgcatcattctttgtttccactctgcagtcctttcatgctgcttacttaggtgttgtaaattttgaatgactctaatgtctacagcatttcctgaattttacatctggacagtattgaagggcagcggggcctcccaaagagcctgttttgcttgactaagttcttttgctgtattgatttagtataagaaattctgggataatgttcaatttcttcatggttcttaaaaatttcaggcatcaacaaaggctgtgtattccaggcaagagatacaatatgaagaaaaaaaacaacaacagactattatcagcttgttcaaacacaaatctctacaggttgacattttcttaggattggttcccagaatgtgatgtattttcttctgtgggtgttcaactcatttgctcttacaactgaaaaaaacagcagtaaaagccaaattgaaccagtccagctgttatactattacttttaaagaatgcctcaaattcttagtgtttacttctagtttagttcgtaccggatttctcttcacatgtcaagctatgaaaaaacaagctgacaaatcaaaaggttgacttcccaatgtcttctgataaaaataatatttgaactattctatctgtaacacaagaatatgtatttatatgtaagaaatcctttggctcttccctcttttgttatttacaatattgggtgcattctcatgatctttctttgctattcattttatttatttttactttcctacatagagagttcttattgtttctgttgtttcataaattttagaagcctccaattttagaactaaaagaaccatattgtagagatttcatgatcgccaagtttaatccttcctcttacctatgagaatgcctgtaggttgcttgtattttattttatttcataaactactggaacatattctttatttttatttttatttttttattttttgagacggagtctcgttctgtcacccaggctagagtgtagtgacgtgatctcggctcactgcaagctccacctcctgggttctcgccattctcctgcctcagcctcctgagtagctgggactacaggcacctgccaccatgcccggctaattttttgtatttttagtagagacggagtttcaccgtgttagccaggatgctttcaatctaccgacctcgtgatccgcctgccttggcctcccaaagttctgggattacaggcgtgagctactgcacccggcctggaacatattctttatgtgcttgtatttcttttctgttaatatttagatctatagtttatttgcagctactgtaaattttgatacatcagatttatcgaacatgctacaaagagtaaattatgtcatagtttgctattttctcatttagatattactccatacaatacagaacataagctttgggcatgtttgattagtaatttaagaatcctttctatctatacaagtagtgacctacgcatcctccatttggcctccagtgtgcaattctgtgtgattaacattttaaaatttcctatttttttaatgctaacttttgtaatcttcaggtgtcagacgtttagatgaaaacagtacatctgctaaattattgctcaaaatattacatattttatgcaaaattgaatggttcacctacaggtagaatgaagagaaacaaacaggcaaaattattctttcagttctgttcttatcatcatacagttgggtctgcttattactaaggttagatcaaaggcctgagataatttagctagtttcctatctagataaacctagacttggtctaaagccacctagcagctctgtgacttgctatgatttagggctgctgttatctcccaaatactggttgtaaattaatgaatgaatccagaagttaaagataactgagacttttacaacatgaagattttcctgactgaaataaaccaggtcatgtgtcactcatttatattttaaattggtttaattagtctgctcctctgtgatcacctagtgaacataagctcttttggggaaacagaagttttgagagagaaggagatgaggggatagtaagaaagggatggttttggagtggataatgaaagctatgatcagatgaaagtgttgcagatgggaacatggccgttctggacagggtatcgccatggatgacttaataacttgggacatggggtaaataaaaatagaaccgtaaggaatacttggggagggggtgtaattgaccctaaaataattgtggaaagccaagactatctgatattttttgatatcaaagaaatataacctagaaagtcagaaaaaaactttagcatttagttcactaaaagaaataatgatccaaactaattgatatgcctgccttaaacacagttttctatgaattttaggctcatatacccttataggaaaaacatgatcacacacacacaaatagcatgtttttcgagaattattaaatattgggaacctgaaggtatcctagagatcctaagatccaaactcttcatttagtaagtgaagtaaacaagtcccagaagattaagtgaattggccaggtcatagagcccatcttcatgcaggattttatagtctgaagtgatatttcaaaattgggggataaatgcttcagacctttcaaaatttaattattgtagaatatagattagtgactaaaatgaaaagaaaaagtttcaggaagataatctctattattttggtataaatgttgacgaagaagagataaaaaatatttttatggcaacggcttgttggatacgttgccgaattttctttaaacaatatgaaatgatttttagtaggaaagtgtcagtgctgtatgtgtgtgtgtatatgttacactttctccgccacttccaagccattcacagttaaacaggatttcactcaaacattgtaacagcagttgccaaagcactaaactctgtatgtttttggatgtcttggtacaaagaataagtaacaggagaaacaccctcagggaaagtttagaaactctgtgtagcttttttcactttaataattacaacagtgttaattcacagcctctttgactagacacttaggatttaagtagcctagcaattctgccttcagctactagtgagttcttttgcatatttatcagatgtgcccgcctttctttttatttcatttttttctttttttctttccttttctcttcctttccttttctttcttcctttctttatccttcatttttctttcttttccttccttttaatttattttttaaagttgttaaactttaagataaaatcaatggggcatatatccattctctatcaaaatagatctgccttataaatatgtttcatttaaaagtcgataaatttttaaattcccagtattaatgtgtgattattttatttgcattatctctttttttaacctagtatattaaaatgtatgtattcaacacacagctgctgaggagctctctcccaccttcattcttcctcaatcaacagccctctctatactaggcactgttgtaggaagtaatgattgttgtagcctccatttattcttcataccaaatactaaattatttaggttcaatttgccgtaatgtaatcttcaccacagtctttgaagttgtatatcattgtcctcactttatgtattaaacaaaattttaaaaaatgttcaaagaagttaatatcaccaaggtcagtaaccagtaagtaagtttgtcgtggttcaaaaccagttcatctgaagttcagagtcgggtgtatgtgctgtgccttgtagactgtgtttgaacacaaaagcaggaggagggatatcatatgctactggttttcttccttctactctgcctactatcttctttcttggctccacttttcccagggcatagtctataaatttctgagaaacattttgcacttctgttatgagtaggaactctttcatgacttcaacgttgcatttgaatgcatatgcttctgcaaaatgtaccatcatcaagttactttaagcactttgggggaacaacatgatgactatacccaactttgccaacatacccatgatatgcatgattcactttcattattttagtataaatgatgccaaaataaatagaataaggaggttaggatttaggagagttgggtgtttcagctctgccactaaacatctctgatatttgggactaatatcttaatatttattggctttagctttcttatcagtaacagaaaaaaagttctagatgtgtttagggtaacatgccatgataaatttttattattatttctaataagagtagcacaaggcttagcatatagtaacatttgcaaatcttaagtgtctaaatcaatgcggttttacatatccttccataaccgtgccacttgataatacatttttttctcatgccatccaataactttttttctctaaaaataggactaggatagtaactgcagaataactaaagacttcacttttttactgctcagatgaacattcaaaataagtattatatggaattttgctgtagttttatgcttacttggcaacacaagcctggccttgtttctgtaactcaaggtttttgaccatgaatggaagttaaattttataatcagagcattttctaagtcttgtcccacaaaaaaataaaatataataaaatggaaactgttcaggccctagagagaatttgctggtcaagcacatatttacacaagtagagtgcatggcactcttgatattgtttctttttcaggagctgatttaatatcctgccttatgttgatgtgcaggctcattggtcatgtaggttagcttagagcttatattcccattcttattatttctggaatatattttaatgtccaggttatgttgaaacttattctaataataaaaatagctgcaatacagagtctccagtgctcacagaaataatgtagaaacaatactttatttaataaaaaagaaaaagaaaattttaaatctaaaatatttagtatcttcttccctgaaagcaaactggagaggaaatatgaatgagaataactgtgtacttgtgtgagaaaaagattctagagacaagagaatctttttgtttgtttgtttgattttgtctaggtaggatacttcactagtccaataatctttcctctaatgtttaacaacattcccacagtaacactcctgaaaatggctatgcaattgggaagctcaaaaatttgtaggagacatgtacatattatctgtacatattttcattcttaggaaaatagcaagtctacatataggcaagcagagaaccatttcctttctttctggttcatcacacttccccaagaatacatagaatgtgttcttccaaagcagcaaaagggatcctctcatgagttctttttttcacagcttgttacaactgcatgtttatgcatcttttcttatccatttccatcgcttcactttggatctctgcacaggattctgacaagctctttctccttctggcacagcagattaatccttttctaacacaacttttaccctttaaattattgatttgaaaatatccttcccaaatctaacttcattctgtttgacttcgtaggcactcacgtctgatccagcctcacacatcgaacttcctcactgttcccttgctaactcatgtctctctcactcttgtacctctcttgtaagatcacatttaaccacttcctaatatgctgtatctgtactccaattttctatctaggtcctgctcatctttctatgtcctattaaataccaccttttagtgagagcttctcttgtcattgttcgtatttcttgttcctttattttatacattaccatttaattctattaaaaattccttttagctaacaactacaatcacagttatcctataaatgttctcttcttggaatggtatttttggacattccatgttttgcaaaaggcttctgttttcaagatttaagcttgattctgctttactttataaatgtgtgccatgtccagtgcctctgttattacctcccaccagaggatgccaggccttgaagaaccctgcctgcatctcacaatataaggagaagaaaccagaacaattggtgtctgggattctagcaggacagatctcccacttggtcccatcagccatgggattcattagctgcagttaacccttcattggtcccaaactcttctctctgaatattgatgagaagatacctggaactttcatggccttccagcattttccccctggttttaatcaagcctttggtaatgagtttgtggcttgctctcttaatgaaccctatggtatgatgaaaactggtaccctcagtaaaaggccatccaactgtgactaaagggctcagaaacaagaggctgagtcagccagtgctgccgcagatctgctgtcagcaccatcaggagaatttatcaccacacaaataataataataataataataataataataataaatgtgtcactgcaattcctactagaaactcaactgccatcagagtgcacaaagtcccaaatttatataaggaacagctgggtcacttccatgacattcaagcttgggctggagtagcgacgttttgtctaagccaactcagaaccctttataatactcctcccacctataattttctgttttaggctctctgaaatatcctccctttctgttacctttacctgaccattacctcgaggaatctctcaaggctcacactcggaatcttttttactgcagcttgtagtccacagtagctggctctttactttgggcacagctattgatctctgcccggaagtatggacttgatcttgggacttccccctaggtctcaaggtctcccttgtgaaggctacctattttgttttccctttcttccatatgcccatgctcaactcccaagatcccagatgcagaaaagctccagctttgccccgaaccaactactcagtatgctcaaaagcaaaaatcacggactataagtatgaggaacttaggtgctgtactgaactttgcaactctcatagtatctaacagaatgaggttacatgttaagtattatttgattaatcaattgataaaatgtcttgtagataaacaaacaagaatccaaataggaccacaaaaatgaaacctgagacttccaaaataaccgaaatggcaggcagtccatgagatagtgtggaacataattgacactaaatagactccaaacaacaaaagattgtgtaatcctaaacactgaagcctactgtaagaaattataatactgtatgatgctaatatggagaattacagtagggattaattaaatgataagagctaagagaagaaacattagttaatagaatatattttaatttttatttttgtgttctgctctattctcttggtctcaggctcagctaaataccatacgtagaaggattaccaacctcttcctgaaagcttgaattacagttccccaggtggatattggtacttcatgaaggatggttggagttgctgaatattttacaaaggaaatgcgtgtggctcaaaggataatctagttatcttgatgaatttatcctttgtagttgaaagaagttttgaaacattagacttcaaagaaaagcaggaaagtgattgagcatttatgtaaatactccctaattgcaaaaaagtggttcttagacatttctaaattgagtgagataaacatcaaaagtgctacattattttctattttacaagtgtcactatctctctttccctccatattcagagatggtttttctgtatcatttctgctaaaagttaaagaaataaaaacgaacatcccatattccaaaaatcacgctcaaacatgggagatattttgaattcagaacacaggttgtccaaaaattaatattacgtccagtggtcagtttcccaggccaatccataaacattctataaaccctagactatagcttaaatctagtctaaacataacacatttgtattaaaatatgtagagtaagctatcctgtaaagattgtaagaaagaagattaaaaaacacaattgaaaaaaaaatactactttttagtgcgatggctgggaggaaagtatgtttaattagagcaaggaacagcaaaccaaactgcagactaaatcaggccacccacctattggtttatattttttccatggctctttcatcctaccatggcaaagttgagtaacttcgatagagaccatgtaactctcaaagccaagagtatttacgggttggaactttccaggaaaaaaaagaaacacacaaatgctggctctgaattgaaagaggaacaggagctagatggaactctctgtaaattttaatgttaacttctgtactgtgagctcctccaagggagcagtgctgtggctcgggcatcctctctccagagatgaggctcgtgcctggcacgtagtaagtgctttgatacagttctagtaaattccaagggcttgataaagcaattcctctagttctttctcatttcatttcagttcaaaaattacacatataattaaatattattttcagggagtgaactttttattattctttttttttttttttttgtagaacacaccgagcttctttctgtgggctaaagtaggcttcagttttctaaaccatgcatgggtatttggtgtaggtacttggaattaaaataaatattctgtctggagtatgtcctcagatataaatttttaagataaaagtcagtaattatcttattcagtaatctttccatcaggcatttttatttatgtaatgtatcataccgagagaggtgttaaaattgtttctctcaacttgtttggcaattgctgacaattattgcgtaatagatgtgtcagtgcatacagccagatttttgttaaggattgtaatcactgtcagtaaaacaaaccctctcaatcccatatcataaaatgtgtgctaaattctactctgcatattactgatattgcattcatgtttgcctatttccattttcttaattttattcagtggtgtttactgaatgcccccaataaagaatagggaattgtggctcatttttatcttacctttaccttcattcccccaaacagcagcaacaaaagcaacagaaggaaaaatgattttgtttttctgtcttctttcatgctgtacatatctttcttactgtacactttccctcaagaattatacgctttaaatttgatttgatatatgcttattcaattatacatgttacttgataactaacttttatcatagttattgaagtctacattcaataggtatgaatcataaactattcaattgaatctgtactttcttccagtttcatatcataattaaaaataacttaatcacttttatagtgtcttgcatttccttggtgtattatgtatttcaaatagactttctgttgcctttatatatgaatgacaatttggatatgaaatccttggtcacattcttttttctgcccaaatgctgtaatcttctggtatctaatattatggaagacaaatctgaaataacttgatttatttttgtattgtggatggcatgtcccttctacctggaagtttatggcatcctttatttttggaaccaataatcctttcacagaatgttttcatgtggttcattttcattaattttatgctatttacattttaagaatgcataatgcattcaaacaacttacctctattcaagaacctagtaaatattaaagctagggccagaaatcagtctcttatatcccgtttctatcctctttcttcctagttactccactagccctgcatcttaaaacactcattgcagtgtaattgtatttattcttgcagaaaaagtcttagtttagtctcaaacttagaaataattttttaaagtctagtcaggtcactagtattgttgagggaagcccacgaatggctttttcctaagggaagagtgattctgagagcaggtaattgtcactcagaatatcatcccacccaactctggtaaatgtgagtagaacatgaaagaaccctcaagcgttagcacccttgcttcagacatcttctgctctaacagaagatgggtcacagcagaggtgttacatgtgggaggtagaccacactgttggcaggcctgatggctgcttttggcaatggtagaagcaaaggaagttcacccactgagagccgaagaagagaaaatggcatgggccacaaagtagccaaggatattctactccatagcacatactatgtggaaaaattctgcagaatccacaaaactatacattatcacagaatcaaatcccataaatattgtcttgtgattctttgtgaccctgtgactttcctctttccaaatttgatatgacctggcttaagtaagatatattgttttctttttaccctctccctttttcttaccttctcccattcatatactctctctcctccccctccttccctctctttctccctctcctattcttttctctgaaaacttactaagggccatctttgtgataagaaattcaaccaacaacacggaactctctcttattcagattcaggtttattatggccacattttctgccttcctttgacaaatcatggattattatgaagcatgaaacccttcagtctgaaaactataataacaaatgtgaggtagtttttccacaacccattaatacgtttctattgctaacctgcctgttcccatgctcttgtgcatttattattaatactgtgagcagaacagttcctctgagatttggatagttttaaaactcacaattctatgcctttctctataatcgtaatattttagagtatgtattaggctatggataaattaaaacatatcacaatagaatatgtaatgaagaccttaggtgagtttatcacaaatgacaaaggaaaactatccctgaagaaaaaacaatccatattgaaacaggataagaacaaccacaaaaaattccataaggaatctgatgaacatttgagtgactgatactgaattcagcccattcttcttgatgtgagtgagatttgaaacagtacagtgagcttttccagtatagcatttttggaacgtgaattaccgtacataccactaacatagaactcaaagtatattaaggctgcaagagagcttggcagtcatttaatatcttacttttcagatggagaaactgatgcagataaaaggcagttgcacgccctaagcatttagctagttcgaggcagaacctgaactaaagccaaatgtaaagtctcttaatgccaagttttcttcactttatcgagtttccttctgtgtcctgcaacacatggcttagacaggttaatttgttctagaaaatgttagatataccttggactcatctgattctaggctattatgtcaaagtaatatgtcatttcaggtgattctcttaatatgagacataaaattattctcagcatgaaatttgaaatggtttaaaaattttgcaatcagcatacccaccaccaaccaaataataaagttcatttattttgcatcttatatcatgaatagactagagcacaccaaaccactgagttattgaacttgcatctggcagaaatcaatttgacatcccaatttggctatttctaggccatatgagtaatgtcataactgtgttacatcagtggtttttcaaatgtggctgtacattataaccacccaggtaaaattaaatcagaatctctggagggagggcctgagcttctgtttgtgataaactaattagagagttttactagtaatgatgtgttatagtaattatgaattttattacacaaaagctacttttaatcacaatactcagaaacacagattgataataaatctatttgtaatcataaagtaaaaatcaaagaatgagaaatgcttcaattttagacattttctaattctctcaggtaatgaaattcggactttgttctttgatccatactctctcaatctgtaaaatagaataacatttcttgtctcacaaaacaattacgaaaattatgttggccacatgataatatgccttacattgtgtacatagttaatgctcaattaatattatccttgatgacaatggtgatgatgatgttgattaataatacttaataatacttcagcttcaataaattaaataggtttccggtcctatgcccattcaaggcttgcatgaggattccagcttgcaatatagacatcttagtttaaattcttactaccacttatagattatttagtggaaagctaaaagtattagtagtttaagactaatggggcatcttagagaaacacagaaggtggaacaaagtctatacatatgcacaaagcagtttaaaattaaacagatttaagaatttagacattgtcaaagagaaagttaaagagtagattttctggtttgaccttttagcaagaaagtaaatgagaagagaagagataggaccatggaggtgacattttgcaggtgcgactgagtgagggcccttgaaattcaacataaatcatttgaatttcaacattcagatgtgattcttgaacacttttgctcatttaatgtaatcatttgaagccttatcacacttcaattgaaagtaacttacagctgtttatattgagagtttatcatgtagaacactcttttaacaatatgaaatactgtccaatcactctggttgccatatctaatgtttcttttgcacatgatcccataaattactttaatggaggagtaattttctcacataagtttgtgattttgtggctaatcttctgagaacatacgttcacagacactaaagacagcactctgacttataatatgtcaggtaataacggagatatacttcaaagaagcgatttccttactgacccttggtaagaacccaggaaaatgatgcaaacctcatgcgttcgtttgttaattaggagactgaacattcatttctactgccttttatatgtgcaggaaggcttctggctctggccattctgcaaaccaaggagataagcagtgacctgcagtggtgctctttccctgttctgggctttattcttctatgcaggaaccaatatcagcactgtcgttgagttgtacttcatcaacttagaaagactgttgaagtacgataaaggatgcacaaagctgttttatttcagtagaccctttttatcagtgtctgtgataattgtagcaatagcatggctctaccacatcaacaaaccatctgtgggccctttttcaccattgctctggccctttccagaaaaatgtgccacatccctgtggtaccaaaaccctttggcaggagatatcatggcttcaaaataagagtgtccaccttcgccttacaatcaggattgatgcattcagatttggtaaagaaacacataagaagcattctcaaaacttttataagtgataatggaaagtaaagcagaattgttacattcctcatgaagttcaagaggtatacatgaataccaaagtgacaaaatcctcttgctcacagcaccaatagtgacagtgaccatttaatacatgctttttttaatgaaaagaagaagacagatcccttctctctctttctaaacagacatctagtcattaagaacatgaaaaatgtcattcatgttttccctaaaaagcattttctaaaatttagtggtccaagaagtaaatgtccagtgtagcaacaaattacaacacagcaaaatttgactttaatcatatgaatctatcactcacagttgcagaggtttggctaagttcataatgtaggtattatgtgtatgtagtattctttctggtcaccaattattgggggaaccacccccaataattcaatgtaggttcttttcagatatcgggggaaccacccctgataattcaacgtaggttcttttctattttccctgagtgttggctggtctgagtaataaagggaaagagtacaaaacagacaaattttaaagctgggtgtccaggggggacatcatatgtcggcaggttctgtgatgccccctgagccgcaaaaccagcaagtttgtattagtgatttttaaaggggagggagtgtacgaatagggtgtgggtcacagagatcacatgcttcacaaggcaataaaatatcacaaggcaaatggggacagagcgagatcagaggaccgtggtgaaattaaaattgctaatgaagttttgggcacatattgtcattgataacatcttatcaggagacagggtttgagagcagacagccggtctgagtaaaatttgctaggcaggaatttcctcgtcctaataggcctgggagtgctacgggagaccagggcttatttcatcccttatcttcaaccgtatcaaccgtataagacagacactcccagagcggccattttagagacctacccctgggaatgcgttctctttctcagggctgttccttgctgagaaaaagaattcagcgatatttctcctattcacttttgtaagaagagaagtatggctctgttctgcccggctctcaggcagtcagacctaatggttatctcccttgttccctgaacattgctgttaccctgttcttttttcaaggtgcccagatttcatattgtttaaacacacatgctttacgaacaatttgtgcagttaacgcaatcatcacagggtcttgaggcaacatacatcctcagcttacgaagatgacaggattaagagattaaagtaaagacaggcataggaaatcacaagagtattgactggggaagtgataaatgtccatgaaatcttcataatttatgttcagagattgcagaaagacaggtgtaagaaattataaaagtattaatttggggaactaataaatgtccatgaaatcttcacaatttatgttcttctgccatcgcttcagccggtccctccgttcggggtccctgacttcccacaacaaccaataactttatttagtacgtttaaaatatagatttttctcttgactttagtgttcaaagcagcctgtaaatacttgtaacatggaatttttagcctgccccccaaaaaagcattctagtttcttttcacaacatactgctaaatcagaaaccctaagatattagcctgttctcatgctgctaataaagatgtacccaagattgggtaatttataaagtaaagaagtttaatgaactcacagttcagcatggacggggaggcctcataatcctggtggaaggcaaaggagaagcaaagtcacatcttacatggtggcaggcaagagagcatgtgcagaggaatcctctaacaccatcgtatctcatgcgacatattcactatcatgagaacatcatgggaaagacccacccccatgattcagttacctcacactggatccctcccatgacgtgggaattatgggagctacaattcaaggtgggtggggacacagcaaaaccatatcattctgccctctgaaatctcatgtccccacatttcaaaaccaatcatgccttcccaacagtcttgcaaagccttaacatatttcagcattaactcagaaatccatagtccaaagtctcaactgagaaagggcaagtcccttctgcctatgaatctgtaaaagtgaaaacaagttggttgcttcctagatacaatggaggcacaggcatagggtaaatacacctgttccaaatgggagaaattggccaaaaggaaggggctacatgccgcatgtgaagcaaatccaaaatccagagaggcagtcaaatcttaaagctccaaaatgatctcctttgactccatgtctcacatccaggacatgctgatgcaagagatggattcccatggtcttggacagctccacccctatggctttgcagggtacagcctctctcccagctgctttcatgggctggcattgagtgtctgcagcttttccaggcacatgctgtaagctgtcagtggttctaacattctggggtctggaggatggtggccctcttctcacagttccactaggcagtgcccctggggactctgtgtgggggctccaaccccacatttctcttctgcactgccctagcagaggttttccatgagggcccctcccctgcagcaaacttccacctggacatgcaagggtttccataaggcctctgaaatccaggtggaggtccccaaacctcagttcttgacttccgtgcattcacaggttcagtgccacatggaggctgccaagacttggggcttgcaccctctgaagccacagccgaagttgtaccttagccttttttagccatggctggagcagctggggcagagggcaccaagtccctaggctgcagagcagaagggccatgggccctgtccacaaaaccatttttacttcctaggccactgtgcctgtgatgggaggggctgccatgaaggtctccgagattccctaaagacattttccttattgtcttgctgattaacttttggctccttgttacttatgcaaatttggcaggcaacttgtatttctcctcagaaaatgggttttccttttctattgccgtgtcaggctgcaaattttccaaacttttatgctctgcttcctcttaatcactttgccaccttagaaatttcttccaatggataccctaaatcatctctctcaagttcaaagtttcacaaatctctagggcaggggcaaaatgccaccaatctatttgctaaaacataacaagagtcacctttatgccagttcccaagaagttcctcatctccatctgagaccacctcaacctggacttcattgtccatatcactatccgcattttggtcacagccattcaacgagtctctaggaagttccaaactttctcacattttcctgtcttcttctgagctctccaaactgttccaagctctgcctgttactgaattccaaagtcacttccacattttcaggtatcattacagcagcactcctctctactggtaccaatttactgtattagtctgttctcacattgctaaaaaagacatacctgagactaggtaatttataaaggaaagatgtttaatggactcacagttcagcatggctggggaagtctcacaatcatggtggaaggcaaaggagaagcaaagtcatgtcttacatggttgcaggcaagagaacgtttgcagggaaatttccctttataaaaccatcatatcttgtgagacctagtcactatcatgaaaatagcatgggaaagacctatccccgtgagtcaattacctcccaccaggtccctgtcaggacacttgggaattatgggagctacaattcaagatgatatttgggtgggaacacagccaaaccatatcaccaactgtatctaaattctaatgttaaacaagaaaattgtaaaatataggctaatctttgctttttatccatacactaatgagctttatttatgtggaaataataacaaagttattttatgctgctaaaactaacttatttgaagttcatgatattttatcctttaatgattctaaaatatgcttgcaaccacaatctgctgtcttttctgagacaatgttttctatatataagaagtagcaaaatgtagtaagaaaatgacagaactgggtctggagacctgaattctagtcctaaatacactgctggtcacttctccaatctggggtttccatttgtaaaattatattccacagatattgaaatatttaaatactaatctgtgaatgtttgtttctgaacctcactttgtcactttaaaacaaaattatgtaattattttacaataaagaatatgggagaattaattctccagctttgtcattttattctttcttctctaaaacagatgctgcaagtattaccaagtgtcttcagccttggaaagataaaacttcctttgcttgctgcagtatttatgtatacaattgattcattaaacaagggatgcatttttaagaatggcttgattttctttggaaaaaacggtttgcactaaaaacattaaatcaggtgcagtttatgtgccaatgaaccaaggaacagcagacagtaaataaagttgagaatactgcacattcaaacagaaagaaaatgagaagaggaaactgcaccagtattgaactaacatggagggcataaactaaacagtgactgacacagtttaaaattgctttcattctttctcaacacttttcactcagtggcttctttacagctttcaattaacctgctccctctgcttccaattgctctttcttactgccaatgatatttaaaagatacactaaattatagattcagaaatgtttggaaaagactctgttaatagttttgctatcctcagatggctttaaaattttgaagggtgcaaactgctaaactaagaacaatattggtgtcaggattcttggagaccagaacagtcaatcccagggtgaccagccagcccagcagatactgagatactgactgcactcctgccaatggaagaccatccaggcacaacctcctgaagccttggccctttgcctacaacgcacgcctcagaatgatgtcagcatttgaaaaggatttgtatttaccacatcatttatcattatatttgaactttttaacatgtactctggaaacatgtaagtcaaactcccttcatgaccacttccatcatgatggtgtgaatctcatgcctattataaagagatccatcatccatggcagtctactgctcctgcacctctagactggaattgacttgccatgtgagttgtcttggtctctttgtttttacaaagtttgacttctgcttccccaacctttagaatgctgtaataacaagaagtttgcatatgcatatggaatgctcatgcacaattacatttgagtgcacagtgagtaatgtggtatattaaccaacagtgcttaaccttaaaagacatttgacagagaatcacccacacttttcaatgaaattaaaatgaacagttagaaataacacttccatggaattaccttatttattttaggagcaaaatggaatgaaatgaattagagactcttacacaggcgttagttcatgtttgtcataacagcaaacagagccattggcatatgtataccaataactacaatgagaggtagaaagaaatgagcaccagccaagcacatgggagttttgagtggaggattagttacagttcagaagatcccaaaatgttttgttgattgtcatcatttaaggtaagcccaagactatagggaaaaattatatacagagagtcagagggaaaggagggagggagggagagagagagagagagaaagagagagagagaaagagaaagagagagaattgtgggacctagagataattacaggatagctgcttctagagaaaccagaagagaagacatggcatgtatagaaaactataaatagttcagcagtctagataatactaatatatttttatgtactgtcaaatataagtatatattcacatagaaagaaacatatgcataaagagacatacaccaagagttaacaggaggcttttgtattgtcgcactactattggaaatttcccagtttctttactttgtgcactcctagtactctaggaggcttcattttatttccactaatgacagtttatcttcaagttagtgtgaaagctgcaggctattatcattgaaacactgggtaatatttttgtacaaatttttttccccagtgaatttcatttatttcctcataacctctctgttttgaagatggtctctattcagtgtaggaaaatttctctactggaaaaaaaatggaaagatctgcaatattatacaggttgaaaagtttttccactttcatttttcctagtgtatgatagcataaactagcatttttttacgttgtaaaggcaagaatgatgtaaaaaccagaaaagaattaatgtacgtaagctcattgttattattcctcatagcaaataatatcacaaaagacaaaacaaaggaattatttgtaggaacttactaaagaatgtctgtttgcacaagtttaaaatttgctaagtcttctcatcaaataaatttaaacagcttactatgaagattgataggtatttaaactgaccttagaaatcaggtatataatttctgactttttggttttgtaattaagacgtgacagtgtgactgaaatttaaattcaagaaattagaccagcagctatacctttaaaagtacctgtagatttttgttccatgatactattttaaaatgtactcaaagcttgcaggtttaattacaggatcactaatttgtttccagatacaagagacttaaaatttaagtataactttaagccaatatttaatcattcaattgttcttcaaaatattaatcttctctgtatttttaaggaaaaatgacttatctagtctaacagtatgctgacttcatttcttttttccagcattaaattacatataaaccagtttttcaagctttaaaaatatggctcaaattaaaagccggtttcttgaggttttcaggtatattagcccattttcacactgctataaaaatactacctgagactggataatttataaatgaagaggtttaattgactcacagttctgcatggctgggtaggtcgcaggaaacttagaatcatggtggaaggggagggggagcaaggcatgtcttacatggcagcaggagggagagaagaggcggagctccaggcacttatcaaacaaccagatctcatgagaactcactcactatcatgagaaccgcatgggggaaatcacccccatgatccaatcacctcccaccaagtccctccctacacatgtggggatgacaattcggattataacttgagatgagatttgggtgggcacacaggcaaatcatatcatcaactatcactaatattcctgcttacaattcagaaatataccccattttggtacaatttggaaatatagggaaagtgatatattctctgagcacttttccctaaaatgtcaattataaattgaagattcagaaaatgtgttgatttttccaaagttgtgtcaaataggtagatatatgactggaacgattaactcaaaagtgaatgacttattcgttatattgaaaatagaaagcccaagtcccaaaataagagatatattctaatttctatgtatcccccaggatttgtgcctcccatttgtttaattgggtgttgctagtgaaatggcagtcttattagctttaacgtatttaaatttatgttcctgactcatgtgccttgttttcaaaccagttcaaccatctacgttatggtatcatcttacatcttctatcttaaatgttatacaaagtgtgtaagatctcaacttgtcttcatcctaagaaaaattcctgcaatgttgtcaaatttgaaatcctttttcttatattctaggtttcagtttttacagtgccaataagaagaaaaatgaccctggcatagaactttttttttttgttttatcattggtgctatatgtgaattccaaggtagtgttttgatgaggaacatgtttagtgagaataatttcattgatttcttggcatttttattagtatatattgaagatccagaaccatctattctttcaagaattatcttaatatatcaacatatactacatttccctaatctctactctgtattcatttagtcaacacaaccaaattcataatcttctttgtatctacatttgtcgattttttccaagacccctttattttccactatctccttctccaaataatgatggttgtaactgtaagttcttattcatatccacctaatcatcaagtatttctgttaattctccctttaaaacatgcctaaaaattattccatctctgttacttgttggggacacaataacctcttagagatagaatccagcaaatggagtggatgtcatttttttcttgaaatatcaatctaaattttagtagagaaatagcagatataattgtttacttgaaatcaatataatgcactaatccaagatgccagggactaagaacttgagacagttcaacaggctgagtcataggaatgggcctgtagggatgggtagaacagaagattgcacagggcaggacagaggaacaaatgagataggaaggaataagaaggaaagatagagatcaaggtgggagtacctactataacatacagagaatgaaaaataagatcagttaccacaggagttaaataattaaggttgtaattttatcactgcacatgactggaaggaaaatatcctgttttgtccctttttacttgtatacaaatgtttcagctgtaataatttactgtggccataaaaataaatgttccatttgaaaacactttacccccaccttttaaagggtgtcgacttcattcaggtcaatagagaaattagagagggtagaaggaaaaaattgaagatgtgaaaggtgatgtagaatcaatgtgacaatgtaattcatttaccttttaataaaaattacacacaacttctcattgcttttcttttcttaaagatcatgagctgaaattttaatatttctgtttctatgcttgaaaaacagtctttctcccttgcccctaccataagcagtggctagctaaaataaactaatccaaaaagtttcagttctttcctcaaaaaatcccattcaatgaagtccgaaaattagttctaaggatatctcaatttatgagtgacagcttctggtagtgtgaagaagtagaatctgtctaaaatattcacatgataactgttttctttttccaagactagagccattataagctgaaatataggtagagccaggtgcttcacaacaatgtttcagtgatggaccacttccacatacacaaggatggtctcataaaattataatactggccgggcgtggggctcacgcctgtaattccagcactttgggaggctgaggcgggcggatcacgatgtcaagagatcgaaaccatcctggcccacatggtgaaaccccatctctactaaaaatacaaaaattagctgggcatggtggtacgtgcctgtagtctcagctgctcgggaggctgaggcaggagaatcacttgaacccggaaggcggaggttgcagtgagctgagattgcaccactgcactccagcctggtgacagagcaatactccgtctaaacatatatatatatatacacacacacagacacacacacacacacacacatatatatactgtgtttttactatgctttcctttgtttctatgtttttagatacactaatgcttaccattgtgttacaattctctacagtatccaggagagtaacatgtaccaatgtatagcctaggagaaataggacatgccatatagcctaggtgtctagtagattatgccatctaggattgcgcaaatgcactctgcgatgtttatatcatggaatcccctggaggacacatttcttaaaatgcagcccatttttaagtaacacatgactctgtattccatcttctaacccttctgcttctggaaaagcacagacttcaggccaatactgagtatggcctctgaacagaaccaaaagagacgttgcagggtaaaaaggagttaatgaaaagttttttgtttgtttgtttgtagcctggataatttgggttaagataatgtttcaacaggaacagaccctgaattactgaatccaaaagggatgtcttgggttgtttctcacgagtggtcatcagatttgtatttctgcaaaatgagattttccatatttttgttagacttcagccaaaacttttgctgtgtagaaaggggaatgcaatttttcttatggtatcaatgagtgagaacatacaaatatataaaacattagtgttaatgaaaagaaaaaaaagctaaaaagtgtaaaagtgaatcaccctgttaacatttatctgaactttctgggggagaaacctgatgtcatagaccacaattagaaaggactgcacttaataggaactttgagtaattatatgaaacaggacaaaatatttaaaatacttttaagtatcctaaaaaagaagaaatatcacattaaaataacattcagagatgattattggcagctcctaattgccaatccctctgctggatgttcaagatacattaatgcaatatagacaatagcctgagccttaccttccacaagtttactgtttgttggattttccagcatatttaaaagtggaaaatgataatgcaaaagaagaggatcaatatatcctgaaagaagaaaaaattccaaatgaaacagaacttttttttaaatgtcccacgagtgtgtgtgtgtgtgtgtgtgtgtgtgtgtgtgtgtgaatcagaaaaaaatatttattaaggaagaactgaaaattgacatattgcttcaattacattgtgtttggaatcatacataatttttctttagttaatactttgtgaaatatatttaaatatactcctgaatttaactggtcacaaatcactttgtcaacttcataatatgccaagttagagaaacacacaataaaataacatctttggacagtcggtcttctttagagcaattgtagtaaggttagtgatacagcaacaacacaaaacaacaaaaaaccaaatcaaatcgacaaaaaagtcacttttgctttcacattttccacatagtagggccttagggatgacaatcctgatggtggtgagtgagattctcatttgtatataaaacatattgtcttcatttatactgcatccttatctgtgcttgtctggagaagctgctaatggagattatcaggggctcacatcacatcatgccacctttttgagttgccacagttgagttgccataggcaaattggtatattttcatgccacatagctacatgaaaatacaccagtaacagtgtagaagagttttttactggtctctattcataacctacattatctgatttcagccaagatatttttttaactgatggctaaatgttattgaaaattaaatctcctcttaaggataaaactagatcagtcgtctcttgagtgaatttctcagatttagttgtagaaaatatcatatgtatctaattctaatttgaatgttaaaaatgttaaaaaacttaatgcctgtgtataaagagccattaaaaagaaaatctcgccttgactcagccattacacttccggcaatccaaactatatagaaacctatgcccccagaatttattgttgtatgtttaagacaattaatttaaatagccaaaatatttaaaaatggtgaacaactgcacagaatataaaatgtctactagatgaaatgctactagatacactgttatgtagctattaaaattgcattcataaaatatttataataatatacaaattaaatctgtcatggttaattctattatcatataaaactgcataaaaataatgagttcaactatgattacagaaaatgtacattatagaggcagaaataattacatcaaaatattgacaacagttgtctttggtagtgggaatttgaatccattatcttttcctatttttttgtacttcatacaataagcatattttgatgtgtaaatacataaacatcttaactattttgtaaatcctgttctctgatacactttagagctacaagcctttggttagtttctgcaaaagttttttgttctgtgttgctttgttttcgtctctataaaagaacaaacttttctctatgctcttacatcacaacaatcaacacagaaggtttttgtgaccaagtgagcttgggttttcccacacacatcaagcaagcaatcaattctgcagcagacacaggttgagtgtcctctaattcagttcaattctaacactatccatctggagttagcatcagatcccagggtgaggactcagttttcaagaatgccccctcccaccacttcagaagtcaacagaaaggtctgcctctttctgatggacaagctacaaatcattcctacaaacccttcctttgggttcagttaatttattagagctgcttacagaactcagggaaacatgcttacttgtttatcacaaaggaagttacaatggatattggtgaacaccagatgaagagatgggcagggaaggggatgagtgtggcagtgtacagcttccatgacctctccaggaccctccagaagcccccaagtgttcgaatatccggaagctctttgaacacttctttttgggttcttacagagttttcattacaaaggcatgattgactaaatcactggccattgctgatcaccttaaccttcatcctctttctcctctcctgggggtgggttggggcagaaagtcccaaccctctaatcctgccttggtttttctggttaatagccccatcctgaagctacctagggactgccagccctcagtctactagtcaactcagtagcatacagaatttattactttgaagattccaaggattttaggaatcatatgccaaaaactggggatgaagaacaaatatatatataatatcacacaccaaattctgaaattgaaaataaccaaccctgcttatgaaagcatagttgtgattttttggggggaatcctttaattcgtaaattatatactgtacctttactacatatatgacttttcaattatttaataaattattgatggcatcatagcattagttttaatatattcatgttgacttgctatcaactcaaggacttcctttcagctaaataaaatatatccatggggaaaattcttgtaaaactttgttttatgcactattttatttacatctcagagatctaaattatctattctaagattaattgggccaacaatatcttaagaaaagaaatgacagactctaaattggaaattaaatatcagtccactaattagttaatagatcttttaatactgtctctaagtgatcaaaatgttctgtgcttctgctgacttctagcactgaaacttgttcttaaaacctgtaatcagaggaaagagtataatgggaattgtaataggtatacctttttttattagctattctctgatatgcactgatatggatgctttgcatatgtcacaattatgagtaaatatacattatatctcttctgaagtagatatttacatgcctagtttacaaacagaaacaacagtagaaaggttatgaaaattgcccaaattccaaaacccagaaaactgacagattatctttgtatggagtctctctcatgccagtcgtttgttggtggtggtttaatgtggtcgtggatcatatagtaaatacttttcaaatgtttcaaccatagagttaaaacatcttagatatttaaactacatttataattcatattaaaaatatcagctcataattttgtcatcccccagtgtttttacaactgattattgtatataactaatggccccacccttcagcaaaatgtctttaatattttaatattcctatttttaccatgcaatgggacaggcaatgtaaggagtgccatattttcaaattgaagccagacatgggaacattacataaaatgtataaaatatacttccctaaaagaaaacgaactctccaagagataaaataaggaaatatactgaggcattgacagtaatttgccttcacagtgtcctccataactggagacttaagaaatatgagtgaagatatatgtcagtaaattgtaggcaagtaagcaagtgttttaattatcttcctgtgattttctgtctaaatatgaagatatctagaatccctttctctattccaagaacacatttattattgttcactgacagcataagtttctccctaccatcacatttattattgtttaattaaacagagacaagtcaagtggttcagaaagaaaccaagtaaatgaatccccatcagtctttacataattaatgatattctctgtagactgcacaatttattaaattgctgagcagaaccacttcagatacacatatttatgtattctgagtcaaagactattctagaaactgtagaacattggaaactaaaataagtcagtggattttttttaaaaatgtgtaagtatgacaaaatttaggagagtaagaactattaatagtgccccattacttcttttttcattttcagaacctttaatgtagtgctatagcaattttgaaagtaaaatcacttaagaaaaataatatgaaaaattaagatattggaaataaagtatataataaaaaagtactgatttctagggaaaaataaataattccccacactcagaccagatacttttctccctatggagtaaattacaagtgaaattttacatttgaatgaatccggccataggatatatattgtaattattaaaagtctaacatagcaacttgaatgtttcaagagacttgctattttatatttaatatgagtgaaaatatgttttaggaatatgttttttgttccttaagattaagttttgtatacagagtcatagacagaagttttattctttctgtctctgggagagcacagcagtaatgattctctatgaggctaccaacatagcaaaattaaccaggaaaaagcaggctcctatgcagagcctattaataaagaaggtaatgacctctaagcattttatttgtgtttcgtttaggcagaattctgttttgtcgtattttacacattattcacaatactgtttttcaaggacatatcacagactaaaatcactgacccagatgacaaaaattataacataagtttgtattgtgaatgtcaatcatagctgttaaaactaatgtatgctgttaaagaaagagtgtgttgaaccattccagcaaaatttttagtgggaaaatccattaaataattcaggagaaattgtaataattaatcattggccttgaataaattgctagaagaaaacaacatactatgttgtgcttaatgaaacatatacgtgaaattattttcaatttctgaaacgtatcatttcaaatataatgagaattctttcattcatgagtcatagataatatcaaagctgtcttggatgctgttaggacacagtatttctgggatactattaatcaaactgaagaaagtaaaaataggtttataaagtagtctagacccaaaagggaggatagacattaatttcttgtgtgatatattggatacattaatatacaatgcatctttagtacttgaccttaagtgtcaagaatataatgcaccatttctcttttataagcagtactttaaagaggtgtttctggtcaacattattttgtactgcaaggttaaaatgatgaaatgcataaaaacatgaaatacacaacttattaaaatgcaattcaccagtccatgttcaggtgtttctttaatgtcagacctcaacaacaacactttcagataaaaattaatcatcaacatgatgctgtatggtaatggcatgaattttatttccatttaaatgtttacatttctctcaaatcaccaaattaatagtacctttaagtctacaatcaaaatacatatttagatttgtttcttttatgctatttttgcagcaatttttattgatagagtatgtgggtccttagctaacaccaagtattcattggtaatgatatcaaggtaagagctctcaaaaaacaacattggcctcaaatattcacccaaaacctagctgtatgattactgcttgaccaagtgcctttgacaaaatctatctaaaaaaaatcagaccttacctcccttttccagtggagccttttaaggtattcacagctttcattctaatttattgtgaccccatatatctacaagtgtaattggactcttaaagtttttagaccaatccaccactagtagcatagtagaatgtatcatgcggtaccgtgaaaaataatgggaactgaaataagaaagacattcatttatatcctgtctaaatcaattactctcttggagacttggttttctttaatggggattaaaatgctttccattcaagatgtactgagtttaaaataagcatcatacaaataatatcttggtgtatggtaggtttccataaattttatctagcttccttcaaataacattatacaaataacatactacattcctactagatttccatcagttttagttgaatcctttcaatctccttcttttcatttatcaatcataacaatgtgttagacaacagaaattttttttagttacaaaatactttcttcaaacagaacaggactgtgttttttttttttttttttttttaactcattcatgaaacaaacattttttgaggcatggttattagcaaaaacattccaaataacgaaagagtggaggatggataaatgaacctgctgttggtttctccctttgttctaaataatagatgtagacatattttaataatagcgattagatgaaagtctgcattatatagtttaaattactttaaaatctctgatggaacttaaaacaagagaacaagtaacaggaacttgagagttagaaaaatattttttaaactttaggcagaaataaagcccaaaattttagtatatttcctgccagattattttatatcctagagataccattaagaaatgaaatagaaacaaaaagctgttgtaatgtagaaacagttaccacaattcagtaaatacataagtaggacttaatttttttagttcctaaagtatgttcttattcatactatatatgactttagcagacttatttacttatttatttactttgaaggagggagtggtggtgtttgggtatataaataaatgttagctgatgacaaagcaactcttttaatttatgaataaaaactgctaggcattaaaagttatttcctgaattatctatttcccaaggtttaaatctttaacttaatactcaatatgtaagttttcatcctgtgaaaaaaaaaattactaagtgtaacagaatttctatatttcactctcttctgtcaagaaaaatttcttttaaaagactaattatttatagttgaaataagactgattagtgttgcttgttccaatgactaattaatgaggaaatggcatgtccttaccctttgatttcttgctgattaataaatcaataaagtattactggaaggaaaaaaaaagcacagaaccacactcatataatgagataatggttgccctttttcactttctgaaaactcatagtctgaaaaaaaaaaaagtccacatcataaatgaaattagctgggcccattgccagacttttgaaggaggactagaattgatggctcatgaagattaaattatttattcactcctggaacatgaaacaccaggacagagttgggacacagccattatggtcgcagcttgtcattgcccttgctgctgtgggtttcatttcttaatatacaggaatttcaaacttcaggtttgttattataggtcagttcttgagatgggcctcaatctagtccacatcttcatgacacatccaagataaaaataactgctaagatttttggtgtttcccagtctgagtttctaaagacatcacagagtaataaaaaaaaaagtaacctatataatgtaggcaggcattagccacctttgagccttttatgctgtgtggatataacagctccaaagtgaggaattaggggcttcattgtaaacccctaaaacttgagctcctttgatgcctctttctgtaggtgatgctgtcgccatttaaatacctggaaatgagccatatgaggtgcagagctaatcttaaaatccaagtagaaaagacttcagccttccattggccctcaagaagtcacagtcagaaccggtttgagagacaggtaggctacctcacttacaaccctacgagtaggctgtctccctagccacaggattctctgggtctcttatgggcactgcatgcaaaacttccttcaccttggatctcttaactttagcctcctgaatcatcctgttcttatgcaacatcagctatcattttgaactcaactagtccattgcctgaagcataagagtcctaaagtgtcaaggccagttgaggcctcacccagctttgtgattttaaggctgcacttttatagatgccactgaaatattctttagatttcatgaaattttgagttcacaagactaatatttataccttaaagaagaatgcttatagatgatctggctttattgctgcagacagaataaattagacattttttacaaaagtcaaatgtaaaagtatagtatctaggatttttgtgctagtacttaaaataaaggaaatgtttgaaataaagggaaatttatccaaaatataattatgtaatcaatcaattaattcaaactgattttagtaaaacttccatctatagaacagctttcttttaatgaataaaatcattaatgaaggcatattgtaaacataaatatatggacagaatagtccagaaaatacagaatttggatgcgttgcgtgagttgtcgaggtgaagaataaagcatcttggacaacaggttgagcatttcaacaagaagaaaacttactgtacagggcctggctgctgtgtgctcccctagatgcctgaaggttctgtctcaaatataccattcccacctcctcccttctcccccagattaaatctgttagtgttttgaaatacccaaacttttcatgtttttaatagacattttgagtaactctggacaaaaaggcattgctagattatgatgaatatatgcactctggagttactatatctgaattcaaaaggtgccctgaaatttgctcattctgcagcctttgtttggttacctaaactctttaaacctcagtgctaccatatgtgaagtgaagatgattgtcttcctattaagactgtgtgggacttgagtgatgtagtacacaaaagcacttaatacataagatgacttggaagagaagagatactaaaatggtgtattttaatttttctccgcctcccgggttcaagtgattctcctgcctcagcttcctgagcagctgggactacaggcatgcaccaccatgcccaactaatttttgtatttttagtagatacggggtttcacaatatggaccaggctggtttcaaacccctggcctcaagggatctgcctgccttagcctcccgaagtgctggaattacaggtgtgagccgttgtgcctggcctgagtatactgttaatatagttttccaccaccggttaccaggctatacctatatcataaatcaagtaatcctataaatctcttatcagaaaaatatagctattatccccactaaccattgcaagactgacggaattctaatatttaccagagtactttggtctaatggcaagggggccaagttctctgttgcactgtgaatgggttgtcgggtaagacagacaagactacttcatttttttttttttcgtggtcacatgtgtctaaccctggacggtcatctcatttccacacacttttgttttaaggtaagaggcctaaataattaagaaccaatcaactaccctgagataagattttgcctcaatagtggaacataacacctgaaaggaaagtgaaattgaatgttgattttggagaaaagaaagaagaatgaaagcaaatttttatgtgttgacttagatagaggccttgcaaacataaacacatttaaccagcaaacaactctagggccctttgcaccaaacgatgcaaaataaaaatgcattaatttcattccaaaagctgcatccgtgcactttatgtaagttgcttaaagattaggaaatcagttactgtgcataaagttgaccttcatttcagacatctgaaaaaaatatagttttaagttaggatgatgataattttcctccggcaatttcgaaagaggtgtaattttgtagctaaagtcgaaatcttgaaagaaaagtctacctttcaaatatgaattcttaatcattaccttgatgtaaaatcaattaccattaccaagcaaaaataagtaagtgctcacttttttgtgaaggtgacattattcttttaatgctgtatttttaatattttcctttttgctttataatgggcccacttagatgtatttttgttttccttagtccaaattttagtaacagttttgtgctttggatcctgtcctgatgggtttgtaataatttttacagaatttttaaagagatattaccctaaaatattagagttccatataggttcttgaccacaaactagcagaaatgtgaataggtatattggaatagcttggccacttcagaattagtgagtcaaacatgaggaaatactataaactagagacagcagacctagaatttatatattatttattcaacattaacagtattatcagtaaatattctaaaattacagtaatgctattaaggaaagaattttctgtagagtatataaagacaaattctatattttttaagtttattaattaagtatattaaaatttcttatcacagaatgactatgaataataataattcatccatagatagatacagcttttctggtctgtagaaactgctaaaatcttatcggattcatatactgaaattttatattttgtcatgctgtaatgctcattcaaagatattaagattctgataagaagtgttttctaaaagcaaaataatatttttgaaaatccaggatatatagtttaatatacagagcttcttaaaaatacatccagatcgcagagtgtattcaactaatagtgtgtgaaacaattaatcactgggggtcagttttctaatttaaagtgaggtggtttggcctgaagtacattattttgaagcccctactatgattctgtgaactatttgacttactaaataaatgtggatggaagacgtagcattcaccaatggtccaggggatgctaaaaacaacagaacccttgctagattgacctaattgggagtctggtgtgtccctgttttaagatggtgagttatctaacaggcacagaacattcagcccaggtatgtaccctacctttaatcatctggacgtataatgattttgagcattagattcccaaagtcatgaatcctgttgaaagagcaccaatgaaattccaaattgaccagagtattttgccataatattatcaggttattttatgagtaattacattttattatagcaattaagacatctaattttgccagtatggaacaactaaatatgagtttaagtttgaatgatgagaagatttcaacttcatcagggtgatgaaaaggtacatagaatggtcatgaagtagaatgaaatacagttagaaaatactgatcactccagcatgtctagggcatggggcccttatagacacaaacaaaatgctcttcataggtgatgcttggtttctgttcagtacattgtgttcttccaggtgactaaaattgattatttgatgatgcctgctaatatctcccccttactggagttaacctgaacatgagatgctgtgattgccagggctgtcttgtgcttaacagtgttcctcattgattcagtctgaaagtctaaagtgctctcaacagtgtagccccttatgccattggacggctactgtagaagtgtccttggaaaacactgaattttatcaacgactggggagtagttgattaatttttaacgtacttgcttctataaatctaagttgccatttccagattaatttcatttcagcagagttgtttatgtgcatataaaggtataatttttaaaaagtgaaatttcaatacatgtccaattctgttggcaaacctcaaaatttaaaagaagctttctttatatttttaaattatgcttctatggtagccataaatctcagtgcacttttctgagtggaagccttggctattgatcaacctttggtcttctgcagctgagttaaatatcatggaaacattagtgttgaaaactaaatagatgaaattgtaaaacctactttacttaactcagtgacagtagtatttgtcatttatttacatgacgacactgaaaatcaatcaaatgtcagattccttttaactactttaacagaatatgtgagattgttgtatgttgggcaactcaagaagtaatttattcaaaccctaatgctggaaattaaataatatgactagaatgactactctggttagtagaacacttttcatcagaaagttgtgagttaaaagattttaagtaacccaatgggaactagattcaaatatcccagttcccaagccatgttctctaattcagatataaatattagcaataaggatgagtacctcataatctttgtgtttccgtctgtagaaatagcttaatgccacctgtcaaccaatgtctgaataaactaaatttggtaaataagatgccatcattgtttttccatggaattcagaggattcggttactgaaatccatggcattaatttttctgcctaacagcctacactctatattgatttttcatatagattaaatttcctttttaaatttgcattgactctttaggcttcggtttcctcatctgaaaagctggtaaaacaatagtgctaggaagaggcttcattgtgaagtcaacaaagattacacctcaaggctacatttgcaagtgcctacacaatatatgtgcattgctatatgttgttgtaaaatttttgaataagacattaatgcattcattttcttaaagaaggactctcatattctttaaaactcagaccccacaatacccagatctacttttatacaaaatccctaaggatgtgataaggactaaataagatcatgtaaatgctctttttttgcaaagtatgtgcttaaatataaactgttgtcattatgaaagtcattcagtgtagggttctatacagttcaggagtcaaaatactcacttgatacagtgactgtcattgtatttaccattcaacattgtttacatttacatacctggctttgttatttccagaagggaaaatccacgttcaccttgtttgcctttcaaccccagacactaggatggtgcatggcacactgaagacactcaataaatatttattttattaatgaatatgaaatatgacttagcagtacagaataatattcaaattgtgaaataaaatacactgaggatcaacactgttatttaaaagattctgttgatcctaaattttacaatgagtcattaaatgtattgctcagctttcataatcttcaatctataatggtttatttttcaaaaaggctttaatttccttggattgttgtaaagttcagagttattcctttaagaaacaggctatattgcattgcaacaataaccccagaaaaataacattagtagaaataatataattaaatattcatataagataattgacttatctgctttactcaaatggattttaatgataatattggactaaccctatgtgacagcatctgctgcttttatgcactgtccccttacctccctcggccccctgctttgccaatccttccgaacataccctggaacatttggcttaaagtttcagaaaatctgctccgtttgataatgtcaactcatcacatttcagttaagcagacatcaaatcaaatgactcatgtcacagatacataaatattacgtacatggaaaggaaatttttagctataaatgcataaaatcttctggtttgtaaacctgaactacattttaaaattttgacagtaagaggaaactgatgtgaaactaatacataactctcaaataatccaatggccaactgatttggaagctactcatacaaaataatacttgcgttaaaaaatgtcctttccttaaagttactatcttaacaaatgtacaatcataaatctactaaaggtaaacatcatttcttataagaaggatatattgaactgcatacacatcttactgtcttcaaattccttcaaaaatataattaacccatccaccttatcagggttagctcaaggaaattcgaaaccatcataagctaaaaatcgttatgtgattgaacctcatcactagataagtgattctgacaaaattgccattttatggaattgatcagaaatgccattccaagaaagagggttcgccttatgaaaaaccatatatatttttatatctatattatcttatatgaataatatatatatatttttttacttgcctttggaaagaactttgtaaaatttgttaaacttcctgtatggaatgaagtaccttattacacatttctactcttgttaaataactgggggaaatgtgttatatctaggcctcactttataaatatttgttgaacttattgaattcagacaaggaaggccagaggggtttgtgtgagctgttctctgccgtcggctgatatcgcatttgctttgataaataatattttaccttcccatttgggtaatgcctgccttaggttgagttcttcttaaagcagattcttagatgaagattcatacaagtggtttatttgtgaattgaaagaaatacatggggttatggggaaatgagacagggaagggaggccagttgctaaagtcaaaacaggtgcctctaagctagctgccacgggaagggaatgtagatgagtgtccatatgtcaatgccattggtcattagatgtttttgatgaggactgctccatgatggttcatttcctggctcttgcaggctgtcatgaaggtggcaaatgagtcttcagggacaggagagcaccctcaggaaaagaagccaagaagccaggggttggctttctcttggaagttaggcagtggttgatgaggtgatcaaggtgggagatatgagtggagaacaatcagcgtctgccagaatgacaaccatttttcacatcttccttaatattttaaaaaacagatatattctaagacttttcttataatgactagagagggttttaaaaagtggttttatatttgatggaacccttgttggtgctgcagttaaagagttacttcaaaatcctgcctcagcacaccctgttcctttttctttgcactccccgaagccaatgtttcagaagcaactgccgatcagcagaattcatctgtttctcccacagggctaatccctgaccgacctggaagccaagccaggctctaacctggcagactcactcttctcctgctcctcttttacgtaatcccatgcttattgattctctagaaaatctgttttccttttgctcaaagcagagtacaaagcaagaaactgcctcgcactctggagaaaacacatgaaatcacaagctaaccagtgactgtcattccataaaatagcagttctattaaagtgcattatgtaaaaatgggatttgtactagagttgttttataggaggttggtttatatcatcacctgtttcattgaaaatttggtcggtgatgagtcatccataaaactggcagaataaaacttcaggagtggctgttgtaaagttcttctaaggctcataaaaccgggttatgcgcttccacagttttgatattgctcaaacatttcatcaaaagaacgtgaatatcatcagtgctacattttaatttgatttttaggaactttcatttttaactttccttccatgacccctgatcttttatttgaaagtatgggaacacttgacccattgttcctcttcacattggatcagagaatacaaaagttaaactcttacacactgctatagataagagagagtttaaatgttagttatagaataagaaccttaacgcttttgtgattatataaaaataaaagctagcatttgctgaacatatgtactgtttcaaacattacattgacttatgactcactgtttacgttcattgcatcacatactctttatgacaatcctgtgaaatagttgctcttttcttaacttttatttcaggatcggggtacacatgcaggtttgttatacaggtaagttgcatgtcacaggggtttggtatacagatcatttcatcacctaggtaataaacatagtacccaatgggtcacttattattatccacacgtattaatacttagaagaaacctgaggcgcagggaaattaaataaccatttaaggtaagagtcaggaatcaaaccctagtttctctacacgaaagtatgctttaaaaaactctactgtgttatgaaataatatgtgcccatgtgaaagaaatatatagacaaaattaatctaggatggaaaatatcacagtggtggttgcctctgggtggggggattgagactgacctggagggagcatgagagaactttccagggtaattgaagcctcctatcttaaccagcacatagttatatatagattgtaagagtatatgcatttgtcaaaacatattcggtggtaacacttaagatcaatgtaatgttgttcccctcttaacttatggatactaggcttaatatatgggtgatgacataatctgtaaataaacctctataatacaggtttacctatgtaacacacctgcacgtatatccctgaacttaaaatacatgttttttaaaaagatcaatgtatggaccaaaggcaaattatacaggcacaccttcccaggtgtgctatcctcccacctctgtttttagtcatagaatctgaatggaagcagccactgccctcatcctgatccccaaaccacgtgagagttcaaacgttgtgcacaagacccagtccagccagtaagaatccttaccaagaacttttattaaaacattgccatcggccgggcgcggtggctcacgcctgtaatcccagcactttgggaggccgaggcgggcagatcacgaggtcaggagatggagaccatcctggctaacacggtgaaaccccgtctctactaaaaatacaaaaaattagccgggcgtggtggcgggcgcccgtagtcccagctactcgggaggctgaggcaggagaatggcgtgaacctgagaggcggagcttgcagtgagctgagatcgcgccactgcactccagcctgggtgacagagtgagactctgtctcaaaaacaaaaacaaaaacaaaaacaaacaaacaaaaaaaattgccatcaaggttaaaataaataaacgaaaaaataaaaatatatatatttcttttttttcccctgtggtgagaaatctgtaaggacatgagtactacttgctgacaaccaagtcctccacttttggagaaggtagtctaacacttcaaatgtggctaattcaactaatgaacttttatttaattttaattaatttaaatttaaatagccacacatggctagtagctaacacacggaatggcaaagctttgggagaatgagtcagatatccacagggtgtaagacataagtaataagaagaaagagccctgatggaactggatctctctggaagggcagctccacccctgcccttcttgtaatctggagatgtaagtgtattagtccattttcacgcattataaagacactatctgagactatataatttatagaggaaagagatttaatggactcacaggtccacatggttggggaggcctcaggaaacttaacaatcatggcagaaggcaaaagagacgccaggaccttcttcgcagggtgacaggaaagacagaaaagttcaggggaaattgccatttataagaccatcagatctcacgagaagtcactcactatcatgagaacagcatgatcataaatcacctcccaccaggtccctccctccacacgtggagattatggggattacaatttgagatgagatttgagtggagacatagccaaaccatatcagtaagctaatgaatacacatgccttcatctctgcaaatgattcccctccagaatattaccctttaaagttacgattaataacataaaaatctttataatgctgtttgtaaaaagcataaaatgcaaatgtgtgggctgaggtaacacttcactataactaagtttccatttatctaacaaataattagtagataaacccaaatggctaattattgtaaacttttccatcttcataaaaatggaagataatataaatagacgaacagcactagcaccttcagggcaccaagaagacaggaggctgaggcttggaaagaacaatcttcacaactttttctaggattggttgtgttaattttcaaaagtctcaggtaaatgagatgggtctggagcaatacctttgcatgatttatgtgattttttttacacttgaattacttcaaggagctttccaaagaatgttttaacatactgtgaccaataatgtcagagctgatggcagcatctgtgattatacttttgaattctggctggtagtgtcagatttgtagactgacattattatttttataatagaagttataagaacacaactctaaagattatggctcatagaattttagaggtggaagaggcccttagagaacatctagtacagccccttaattttacagatgaagaaacaaaagcccaggagaggcaaactgagttgccacaggtgatgacacctaattactgatcgagctgacactaaatccagttctcctaatccccaaagcttgctgtcagtgagccaatcccaatacatcataccattctgacttttgccttttcaaatgatgtcttaattaccgttgatatattttataattttgtaggagctgacaaatttgtcaggacaaaatttcatataatgtgatatattttgtgactttggcgtcaaggaatgcttgtataagatgtttgcccttcatgaaaatcttgaagtattggggaatgcatgctaaaaaaaaaaatcactagttttcaatgaaattttccagctaggtctaatatcaatgtatgcaaaattatcttaaaattgtctgtatttgccacctatatcatcatttacagtatgatagttgcaggaaggacacaagctcagatttgggtagaccaggttcaagtcagccacagcaacttcttaactgttcaggctttgtttgttcttgtgaaaaagagattaaaattgtactagtatagaaagcacctggtattatagtttgtcctatagagataataaatatatagtaaaacttaatgaattggattatacactagaacattttcacatttgaactaatagtgtgattgttatgtaataaatgtggttaataaaatattgatacagtataaaatatataatatctgattaatactaatataattctgttacacaaaaacttttaaaacgttatgaatgaaaaaaattagttataagcatttgagaagattttgcctgggatttggaattattggaaacctagtagatccatcttcttgcagacctagaatagaaacactttggaactgaaaagagaacaagagataaaattttgttgcactgctttctgttcaccttcctcctgacccttcaaatatttcatcccacccagtctgaggcctatgcccaaagtttgattatacattgttattagataatgtttgtgcctatcatcactgagaagtacttccagagtccagagtcgtcttcacttgcattataccacaggttggtccttaatccgtgtgagaatgaatctgcatgagttgaatcactccatttctgaatggaccctgcaggtcctcttcccacaaccatgaacaactttaggatattgtcacttttgtaacttttttctttcccacatcctcacaatatcctccctttgtgtccttcccaataatgctcacacatgattcaataactgcaacaatttatactgaaggctatatatgcaacaatatatactgcaacaatatatactgaaggatatactgaatttatacagaaggatatacgtataaatatacgtttaaatatacttttaaatatacttatatttaaacaatatatattgcaacaatagatactgaaggatatactgaatttatacagaaggatatacatatccactgcttcagatccttgtcttaaaccaatctggagatattcaaattattgataaccctccagacctggaatctgaagctgtagacctgaagattagcctgatatatttattttcccaatatttataatcaatcagataaagagtccgatattttctgggtaaaatcctaggtaaaatatcaaataaaattcactggaagtactcattatatagcagattactgaatgactaaaaaacctaatagagaattctgttgtgagagcacttctaacataaatttattttataatggcaaatttcattagaattcagaaaatgtaatgtctattcaggactgtttacttcttaacatattaaagacaaactatattttgctaggtgaacaagtatttttcttaagtcaatacaaaggattggaaaattaaattttcattgcattcaaggaaaagacaatgaggttcctatcatttatgtatcctcagtgcctagcatggtagcagcacatcactaattcacaagtgtttgtgaaaggaaggagggaggacaaaagagaaaaggaaggaagaaggtttgttacagcatgtcaagaaggtggaaatagaacttagattcaagactctggtttttgatttccctttgaaatacccattttttaaaaatgcttatgttacctagaagtggtaattactaagtcattcattctagcaagaaacatctgagctgctactatgtgcagacacctctggggatacaatacaggtgaaacacaagccactgccctccagatatccacaggctgacaagagaaaggatactttgtacatttctgtaaactgctatcaagaacatagtaatgtcctgtagcccaatgatggaaggaggctggaaaatggcaagagagcaaataaatttggagaataattgcttgagcaaaatttgaacacttaagagaaaatcaatggtcagatatgttaaaaagatggaattcctggtagagaggatggcaaatgaaaggattggggcatgaaactgtggtgaaatttccctaaacattcagttagtttggtatgactaaagcatagtgtgtgtgtgtgtgtgtgtgtgtgtgtgtgtgtgcgtgcacatgtatgtaggtatatgtgcatgtgtatgcatacatggatgtatagaacatagggtaggggtgggaaaaggtaaattttttttttttttttgagacggagtctcgcttgtcgcccaggctggagtgcagtggtgtgatctcagctcaatgcaagctctgcctcccaggttcatgccattcttctgcctcagcctcccaagtagctgggactacaggcgcccgccaccacgcccagctaatttttttatattttttttagtagagacggggttttaccatgttagccaggatggtctcgatctcctgacctcatgatccgcccgcctcggcctcccaaagtgctgggattacaggcatgagccaccgcacctggccaggaaaaggtaaattttttaagatgacagtgaggacacttggtcaagatgaaacaatagtaagatcagggactatgtatgatgcctatatgtgccaggcactgttgtaatcattttatacacactaacttattcaatgaacacatagacacaaacccacacacctttgagctatatcccattgtgatcatcctgaggtacacagaaagtgctttgttcttgtcacagagctaggaagcagcagaggcaagagttgaaactagccagtctgtagagactcgcatatttcatgccaagatgtttggacaagagaggaactgaagcatgctaataacgtgattaatatccctagattctgactaagtttgtggaagttatttataaggaggaaagctggagaaccaaggcaacaggtcttcttggggtcagatgcagtagctcaagatagcagaaagaggtcagtgaagagactttgatctagaacactgagacctggtcactagcttcagtaagagtggacatggggaggactcactgtcacccttctgtctagtttaggtgaatgagtgagaatgaggagtttgatttccttagtgaacctccataggaagtgtctggcacacagctggaatgcataagatacagctctggcaatcttgactctagacaaacatggagttactatcttcttaactggaataggtagaaatataggacaaataccactgtcaagcttcccgcttttcacttttatttgttattataatgtagctatggaagatatgcaaagaaggaaaataaagtaacctccacaccaaagtattattattaataaaaaataaacacctagctcttatcctaaagaggttattaccaagtggtgagaaatagttataaagtataataagtacatataagccttaaatttccaaacagatttgcataatttagcatagcttgtgggtaatgatgatgataaaatcactaaacatctgctaagcatttaaacaacattttccttccgttagcatcagttgctggaaaataacatactttggctcaaattgtcctgttaaaaatatagtttggggccagcagaattttattcatgcttttatatggagtctccacttttttctgtaaatgtatttatagccaaaagctttcaccagttaggaaatgcagcagatgccaataagtacattcattattttgattatggcaatgtcagactttcagaaaacttcctccatctctatctgtagcacaacctcacatagggagggaccatgtgctggtcaggaaataaacagctttctggcaggagttaaatgaaaatactgtttattactcttataagatgttataattgacggttttattgtaatacaatagcgattatgacatgttgtcccaaaccctaattttgttgttttgtagcaagttacgtttttatcaaggaacacagtggtttaaaaaaaaaaaaaacccaaaaaactaagatttggggccgggcgcgatggcttacacctgtaatcccagcactttgggaggccgaggcgggcggatcatgaggtcaggagattgagactatcctggctaacacggggaaaccccgtctctacaaaaaatacaaaaaaaaaaaaagtagtaataataaaagtagccgggcttggtggtgggcgcctgtagtcccagctactcaggaggctgaggcaggagaatggcgtgaacccgggaggcggagcttgcagtgagctgagatcgcgccactgcactccagcctgggtgacagagcgaaactccgtctcaaaaacaaacaaacaaacaacagcaacaaaaacgaagatttggataattcatgtgtcttttgttttgatctcagaatttcctcattaacagatgtgaaataatttaccaagtttttcttcaaattgactaggcctgtataaaataacagaaatgccctttgcagtgaaagcactttgtattagggattgatcactcaattacattctggatgagaagaaaaaaaaaatcctattggtgtttttatgtgattacatttagggagaaaaagtttggaaagctaagaatcttttgtgggaagacaaaaagaaagagcttttaaggggcactttgaatacagagagtgactttagatagctagcaatgctgtttaaaagttacatcatggctttaagcaaaatcaacagcagtgaaacaaactgaacaagcagaaaaaaatataactcgaaacactgatgagtagtagtttttgaaagtgaattcatccaataaactacatcaaataaaggcaaataaagacaatctaagcttcattcacaaagtacatagagaaaaatgcttgaaaatatatcacatccaggaagaattttttaaactgacaggtgaagttattttactatatataaattctttaaggtggcagatatcttgtcaaatgaccacccttacaggaggacagtcaacttgattctaattaataaacaaagttttagtggaaatcctagaacacgtagattcatgagactcagcattcaacttggaaacccgcagaaactgtgtatctaagccactctaaccaaatagaagaaaaccttctacatattatgtgccagggagacgttaggcattagcagtgcacagacagtcatggttcaggctttgacgctgatgacaactggtggaatgtgtgttatctaccctgttattgtactaacctatcctctatcctcatcacacagtatgagaactacagtagcttgtcttctgcctaaaatctcctaccacttccacagtcatttaatctgccagctcactgttatgctggtatttttaagaaataatttcatataattagtctctttctggatgaaacactgctaaggtgtttattactaacctaaattcagtccttttcagctctttcactctttgtaatccaattccattctttgcagccagtattcatttctgcttgttctgaaatctatcccatcacttaggatttggaaactagcagacatgaagattggctacaaagaatgtaactagatttttaaacagatttagctctaatcccatttcttagaacaattcccaacttgaaacaggaaatatctagatggtttcactgtccgattctgtggtgacccaacctcttagcactcagattctgcctcggccctactgagattactagtcttacccaacatacaacttccttccacatctaccaggttgaggaatgaagcaaattatgtgaaataggagaaatacttttagaggaagcttgagtattggtgtattgggataatttatatgggatggtaaagttagagggtagatgatggcacttcattacatctgcaaaattttaaaaaaaattatcctagggctaggcatggtggcttacacctctaatcctagcactttgggaggctgaggtgggaggatccgttgagcccaggagttcaagaccagcctgggctatatagtgagaccccaagtctacaaaaaatacaaaaattgaccaggcatggtggtgcacacttgtagacccaggtactctggaggctgaggtggaaaggattgcttgagcacaggaggttgagactgcagtgagtcaagatcatgtcactgcactccagcctgggagacagagtgagaccttgagactttgcatcagaaacaaaacaaaacaaaacaaataaacaaacaaacacgttctggaagtagtatgaatggtaggttgagagatgagggtaaattcaattgagaaagggatgcaaatgagaacataattattagtaatctaaaagagaaatggtgaggggaaatttttaattaagataaagtaaaataatggtgaaatcatgaatttttttattttgtatttcatttttaaaaatcataaccacatgtacacttcattactttaagaaatgttacttttgaaagaaaaaatagtcatatccattgactctcaaatattcttatgagttatttatactaaatgaatgaaaaaggcagagaatacaactatgtataaaatatgagcccaattttttaagacacacttatgtatagataggcatagagagacagatgggttaagagatattaagagaggaatgatgagagaatagaaaaaaactttaggggctgggtgtggtggctcacgcctgtattcccagctctttgggaggccaaggagggtggatcacttgaggtcaggacttcgagaccagcctgaacgatatagtaaaaccctgtctctactaaaaatacaaaattatctgggtgtggtggcatgcatctgtagtcccagctgctggggaggctgagacagcagaattgcttgaacccaggacgtggaggctgcagtgagctgagattgtgccactgcactccagcctgggcaacagagtgagactctgtctcaaacaaaaaaaaaaaaaaaaaaaaagaaaaagaaaaaaatctttaaggagatatgcataaatatttcattggttgactctagttattgacactataactgatttgcatcttctttcttgcactttcctaatttagaaaattcaattaatatttctttaataaagagaacattgagtgtatctaaaagtatgtcaattggtgagtaatgaaagaaagtgtcaataaaaataaccggaagagtgcagagaacaggtgtagaaatatcaaaaaggacaagctgacaaaagttttgattggtggttcagggataatagagagagggagaaggcaggcatccatgataatttacattttcagctgcatgttatgcatggctgttgatggaatcagcagtgcagaaggctcagcataaataaataggaggtgagaattgttccaagtgaaggagaggttggctgtgggaacattcggtctcaaagcagaggaatattttaacactgacatactttcaaattgctacccatggtaacagttaaaagcaacttcactgtatttggttttgttattattattataaacttccacttcctacaaagcatgcactccatctttgcacctgaaaggagttgttttcactgctgccctctaccttggttcatgactgggagaaaagagctgaaattctacaggattcattttgagagagagaattcaaagcactatagcgttatagctgcaaatatccaagcgatatttggggataagtgtgtgacactgaggagaaatagagtttgaagataatagtttaaatctttgtttagtagtaaacactttcattagtggcctaaacaccttgtttagtagtaaacactttcactagttgcctaaatgaaactctcaacagcataactttctagctgcataatttcggcaagtcccttaatctcactggacctcagtcttctcatatgttacataaagacgataacagtataaattctgtagagttgtataaaagttaaatgaatgaatagatgacaacagcttagaacatggctttagcagattgtaaatactatgtaaatattggatattttattttcagtatatgtatatattctttctacagagcaagctctttatgcattaatagtaatcttgctaaaaatccaaatctattcagaatgagtactacagaatttttcttatagaaatattaccaacattaactcctctcttagataaatgtgattcacatttcatctctttatgcaatttccttattgttttatcattttcctattgctctattctataaataatgaatacagcattttaatgattcttgtaaatagagaccacattttttaaccattgagcatacggacaaattttattcataatattttatttctttcattgtacttgagattaatagcacaatttctcatccacaaagtttattataggttgtaaaaatgaacatgatctctcttctgattggctcagaaaagaagtttaatcttatgtaattatctttcgaatcacacatgcatcagtacaatcaagctctctatctattagatcactgaaccgtttcacatgagtttacagattaatattcatataaaactatatatctttcagcatatctcctcttggtaggttttcttaaagaaaaacaaaaaagagtagcaaattggaaccttggatatggaagaactgcttaaaaaatattcaatgaattgccatcgggtcactttttccccttataaataaaaagttggggtataaaagcagaaatatcattataaaagaactggaatgtcagaaaacactaagaacattctgtttcagtggtatacaaacttgtttgtccttttaagccatgaaactttttctttaaacaaaatttcttcaaaggtctaattcttaaaatagataaactactgtgaagggcagatgctacgaggacaccccatgacccaactcccaaagcctttctttgtaatctctctgctccaggtagtggtttgaataaggacggcctaatccaaacattgccttttagagagaccttgagaagcagtgatgtagcctaggttacaaggtaatccagtaaaatgtatccatgagttccatgcgctgacagagaatgcattgttacattaattttttttttatatcatcccaactatggaaacttcagttgccaaatgctactgctacataatgtattcatcttttggtagtaaacttctctgctccagtttatttttcagcctatgaagttttttgttttttttttcttattaaaaaaatctcaatttagaaataaaaatgagacaagcacagtcaaaatttaaattagcttggtttcagttcctattattaaagagatttttaaaatatcctacttttgaacatctttgctgccatccttcatttctctcacaagggaaatataattcagcagagtcaatcgtgactgttttgaatatggtttactaaattcacaaacaaaaagtgtctctgatagtcaacacaaatatataaacaagcattgagtaaacggcaagaaggataaaaggcatttttccaaatgaagacttccattgaaaagaagaaattcaatgaaccttccttaaaacatatgaaacattctattgaattttgatctaataaaaaattgtattaaatttgctgtattagaactgttacacacttgagatcaaaaaagaaaacaaaaaatgccctaactataggtagggacattgtaggactaatggaagtgagtatataagtccacttggcaccagagatttttttctaatgtggaagtgtcaaaagaattctgctccacttcaaagcagtgcctggcaggaacaggaaagcataaatgtcactgaacaaacttagagacaagcacttccttcactgaagagaaacctgatatctttctagaaattctagtatgctgatacaaaatgctagacactatctaatttcattcctccatattaatcagcaccttaatgtatgttgcagtttatagacagtaaatatactttaatattttctttctttgcatgggtaaagaataaagaatgcaagtcaatagaaaagaaaaattttaaaataattgtagtaattggctataactggtgagtatagcttggctttggagtgatgtagccctatctttgaatgctggctccactatttgttatctatagaaatagacaggtcatagaaagcatttcccatctggcaatgtacttgtgaagattaattaaaagttaatctattggccgggcacggtggctcatgcctgtaatcccaacactttgggaggccgaggcaggtggaccgcttgagtcaggagtttgagaccagcctggccagcatggtgaaaccctgtctctactaacaatacaaaaaatagccaaccatggtggcaggtgcctgtaatcccagctatttgggaggctgaggcatgagaattgcttgaactcaggaggcagaggttgcagtgagctgagatcgtgccactgcactccaacctgggcaacagagcgagactttgtctcaaaataaataaataaataaataaataaaaagttaatatatttaatatagcttgaagaacctagaataatacctggaaccttataagcattcattaattggcagctagtgagtcctttaagctctatgattgcaggaaatatacattcactaggattacctcaagtaatggggaaatgtttttggaaaatagatatggatcaagtaagttaggagttctgaccctgcaacatggaaatagggcacacccaggtcccagttcagaaacaaggtaaagctatagtggtactcttggccacatctccttagtaagacgcaggagtgaacctgttttccttcagtattgtgactagctctactctacttctgcatcaatcagtcctgttcgcagcaactagtcacctcctcctttgtttaatgttcatcatctttaaacatcgacctgcttatagtatccacttactcccatgtctgctgacttatagaaaagcaaggtacaggtatgtgaatgtagaatgagcataaaatataattaaattaaagcgtaatcagcagaaactctgtgcttttgcatagtaatcctaccagtgaatgattctttctttgtatcctattttgacccatcaagacaaattttattggtctaattaataactaagatcccttctgagcaaagctcttctgtgagactacatacagaccagtctataattgctctgatgaagtgcatccgggaatagggtgaggattggtttctcgtggcacctatcgcagccatttatcctggaagaattccctggaaaggaactgcacatgtggcacacacttttagacttagcatttctatacttctcttgtccatttgtgcagaaaggtggagagataattcagaaagagagctagtttaaagctagaataaaccatgcaaacacattttttttctaatttttgcaaattttctccaatatcctgaaggttaaacagaggttattctgttctgttttctatacccatgctaaggttcaagaaactataaaagaggctggctgactatctctcaaaaggcttcctaggagaggttttccatggccctgggtctggacttcacctagaaggatttaaatctgagttgattaacaagatgatatccttcatggaaaaactcacaggggcaaagctcaaaataagcttgttatgtatataaaaaagacaatttatcaatttagaaaagatgccctgaatgcctgtatgtgtatgtgtgtttgtgtaattttatatattaaataatatataattttaattgacagataaattgcatgtatttatcagcctatatttttcatgacatagtttttcctctggaaaaggtaagtagaaatctaaattaaaagctgtatattgctcaatgaatttgaaattgagaaatgtgtgtagttcaaatattttgtctagctacctatagggatatgcttggcctaaaaaaatctttgagccagagattctcctcatttggagtgagactaggtatcctccatattagcctataagaatctattgtttttttggtttctgctgtggaacacttctcctgttgggacattctgcattatttatattagtacatcaaatcaaggtatagacttgtttgaaaactattctatctctctaataaccctatacacttattcattcattcattcaaaaacttacttactctgcacttattatgtgcctgacaccttaggcacataataagtgacaaaaacaatgtcaaagacattgacatttgacgttgacaaaaacaatgtcaaagacattgacatttgacgttgacaaaaacaatgtcaaagacattgggggatacaagagtgaatatggaaagcaatgtctttttcttacttggcccttaggctccagttaaggtagagagacaaaaacccatttaattattccatctctcactctattgcataatctcaatctattggaatgtaatccgtttagggattatatgttatagaacataatctacatgttagagtatacaatcccaattgatcctgcaaacatttctagaaaaaatcctatcaaatgagtaataaagtgttctaagcactaactagaaatgtattcaggtgaaaaagaaaaatccaaaaaaaagtgtttttttttattatggtttacttgagaatagaacttaagataggaacatttatcacagatttgactcttccataaaggattgatcaaagagcttaattctcagaaggtaacttaattcaccttgcgatgaggtcaacatgactatttacctcataagcaacttgaattttcatagtataattagccagtggtttttcaagtctaaagaacagcctttgccatgctaaaacatgatgaagcagtgactcactacagaagacaagccttttcagaatatactctgtgactcttttttttttattattatactttaagttttagggtacatgtgcacaatgtgcacgttagttacatatgtatacatgtgccatgctagtgtgctgcacccattaactcgtcatttagcattaggtatatctcctaaagctatccctcccccttccccccacaccacaacagtccccagagtgtgatgttccccttcctgtgtccatgtgttctcattgttcaattcccacctatgagtgagaatatgcggtgtttggttttttgttcttgcgatagtttactgagaatgatgatttccaatttcatccatgtccctacaaagcacaggaactcatcattttttatggctgcatagtattccatggtgtatatgtgccacattttcttcatccagtctatcattgttggacatttgggttggttccaagtctttgctattgtgaatagtgctgcaataaacatacgtgtgcatgtgtctttatagcagcatgatttatagtcctttgggaatatacccagtaatgggatggctgggtcaaatggtatttctagttctagatccctgaggaatcgccacactgacttccacaagggttgaactagtttacagtcccaccaacagtgtaaaagtgttcctatttctccacatcttctccagcacctgttgtttcctgactttttaatgattgccattctaactggtgtgagatggtatctcattgtggttttgatttgcatttctctgatggccagtgatggtgagcattttctcatgtgttttttggctgcataaatatcttcttttgagaagtatctgttcatgtccttcgcccactttttgatggggttgtttttttcttgtaaatttgtttgagttcattgtatattctggatattagccctttgtcagatgagtaggttgcaaaaattttctcccattgtgtaggttgcctgttcactctgatggtagtttgttttgctgtgcagaagctttttagtttaattagatcccatttgtcaattttggcttttgttgccattgcttttggtgttttagacatgaagtccttgcccatgcctgtgtcctgaatggtaatgcctaggttttcttctagggtttttatggttttaggtctaacgtttaagtctttaatccatcttgaattaatttttgtataaggtgtaaggaagggatccagtttcagctttctacatatggctagccagttttcccagcaccatttattaaatagggaatcctttccccattatctttgaactgaaaattcacatcttaatttgcacagagtattctgaaatatcaaatgtatacctatattggaaactttaccaggtagcactgccacattcagtttttacataagaaactgagcattttagcatatgagttgggaagtcaattgtcctgcttgatttcctatttggcatgtctgtgataatattgaaattgcttaatgattttatttattccttggagaggtggatccgtacacaataagcatttgcaaacacctgggacaaagtatggacctctgtcagcatagtctgtttataggcctaggaaagtatgaacagagagttgagaaggaagaggcaaaggcatgttattttactgagacacaatgaaatggctgtacatagaaaatacatcttaagatatcagagataaaagctataaaaggggcaggaagaacaaaatgtaaaaattagatagtttcacttatttttcctttctacatccttttttttttttaattgggaatcttagattggtgggttttgggggagggtggagttccttttctgaggtcctttattttctgcttgagtgcctgaaaatagatgcaagacagagaatgtctccactgactctcacggtggctgtttattcagagtgcagccttcatttggctctcctggaagctggctgtgagacaaggaatccaggccaagttctttatttggcagggaagtggagatgtagatagaaaagaaaaggcaactaataacacattatcaagtcagttaccagtacaggtagctgtagcttaatcccactgggaaactgagaacccttagaaaagtttgccatcagcatcatcttctctggggcataagggatctggggttcttataccccttttccccaagtggtcatgatctctcttgtacttccagcctgtggtgttttcaggtgcacaggccgtggctgcgtgagaaaactctcagcccgttggaagtcaggagtgcaccacagtgaaaagggctatgggggcagagatggatagagcatgacagttctgctgtaagtggcccaagttgaagggagctgttctcccgtctgcctttttgccttcttataaaaaccaaattagcaaagacattgatacatagacttgtcttataaccaattatggacttatattaattacccatcaatattctctgatccatagtacatatggaaatgtgtgtgtgtgtgtgtgtgtgtgtgtgcgcgcgtatttgtaaaatgccattatccctggtattctatattagcctaagcttaaaattcagtccttgtactgttactttttactgtacatctgtgacaaaattaatactgccatatgatgggtgcctaacaccacccactgcttttaaattatattctcattttttgttattcaatgatggttcaactatttcaccaagaattaaatagaagtaagagtcaaaatgaccaggatattttctctaataccgctgtgtactattaaaaaaataattaagatttctttattcatatcaattatgagttgatgcactgaatgatgtaatatttattcatgttaacagtggaaaatgtgagtgggaacagctttcatatggaatgcttttcttgtactttagaagtaaataaataattaaataaataagagttctaatttatgggaaaattgtcttatatgagttgattttctaagcctttgttttaccagcctgaaagaggaatgctacacagtcatattttaatggctttgtttattcttttagaaaaagtatcaacatgacatcatctgaggctaggttgtgctgcatactaataaaaacctgagaaatgtatgtttgacttctgatgtaaaggttttctttttaatatagacttaataacaatttcatacttaaccgatgagagcagcaaattaatcaaacaaatcgaacattttcttctccagggaactggggaagcttctgatcccttgatatgattatatctatatatcaaattccatactaatgacccccaagagagatggctttatcaataagattgtaagttattaattaattaattagtctcctggaaattctactgtgtgattttctgtttttacctcacaggagggagttctgagttaccttgcttcttcagagggttagatttttcatgtttcagggttgaacaatgaggtgtaggcaagagctcaagatagcatttgaggggcttcgtttctgtattttagactattaagctaacttctataaagggaaagtactaacgttgatatttagagaaaaacacggggggagctaaaacaagacagagaaagacaatttgatgcccttaggatggggtgatgacaacaggtttgttccaacatagcagccatccacatagctgtaccagaagcaggaccttggcagggaagttctgtggccttgtgtgactttaaccctgggaacccggcaaagatttctgtaggcagagttgatacaaaagggaatgttctcaaagtagccaccactttaaatgaataaatagcacctcagtagaagaccactggccagtgttctgtccaaattcacacatggaggcaaaggtagccatacaaagtgatgaatactgagtttcttgctaatttcattgaatgggtagcttgaaacaattactttgatttagaaaaaataatgagatctgacatactttgcattgcgtcttcagtttttctgatcaatccgtaagttacatgatcttcacatacaaactaagaccattcacataaaagagagaaaaggagtaattatttttgctttcttagcaagtgcctagaatagcattttccggtgcatgcactggggacaatcagggccataaatttctgatatgaaatacatttaagaaataccaatatgagggcaatggaaatttccggtgcaagcactggggacaatcagggccataaatttctgatatgaaatacatttaagaaataccaatatgagggcaatggaaatttctttggtaatttgcaaaacatattaacatattaaaggttctgaagtaacccttgttactagtttaactttctttaacccagaattgcccaaacttacttgagcataaaagtgttttaacacttctgagaaatatcctttcagataccagatggctagataaaaataaatagttgttctacattgtaatagcatctattacagtttcaaatctaaatatctgtctttgttccaaaagcaagcttatgtatatgattgtttttattttctatgtagactcacaaaaggagagacatagaaaatttaactctacactatcattcccccagattcaactctggcatgataaagatcctagagtgtattacaaagaggtcacccttataatatggtaaatgcatatcttctgctataaatattttcataaagctcttctcttagtcaaggattgagagtacaactggccgtctttaggaaataggaatcaggaacgaatggttgttgctcaaaagcataacatttaagtgggttaacagagcacttatatgaatgagcaagaagataattgtgctattacacacagttttacgaccattaaaatacctgttctaatttggcatcagatacgtgagcacaatgtgaagagcctgaggttggaatgagagcaggaaaaatgtccgaagtttggacagggagcaaagaaattgagaaaattatagaattgaagagaaaaccatggtgaggcacaaaaaagctgtataattatatgaatgatattaggtggttggcaataagcaattattaatattttcttttatgagtgaggaaaaaaaaagtatggtcataacagagggaatgcaattcgagcataagaagaaacacgagagtattatgctgtagtagtccagtctcactctgctatgaagaaatacctatgactgggtaattcatacaggaaagaggcaaaactgactcacagttgagcatggctggggaggcctcaggaaacttgcaatcatggcggaaggcaaaggggaggcaaggcaccttcttcacaaggcggcaggaagaagtgaatgcaggaggaactaccaaacacaaaaccatcagatcttgtgagaactcactcactatcacaagaacagcatgggggaaaccacgcccatgattcaattacctccacctggtctctcccttgacaggtgaggattgtggggattacaattcaagatgagattttgggtggggacacagccaaactatatcacatgctaaagcagccaataatatctctaggaaaatgttgtagtttagggtagatatgtgtttggaacaatttagattcaaaactcacagaattgtgagtagcaacaatgattactcttaaattagtaatgctggaatataggtaattttaattgtgtgttctattctgtggtgccagtggcattttcccccctgatgttatttttctgcagctccggctttgtacataaatggataatagtgctccttggtgatctattttcaagtcaaaattctttcttattttctgctgaggtttagcattccgtggataaaaagcaaagtttttcattccacagcaaaatataatggttaaaataccaacagctttacaggaaagaggaccagcctaataaccctgaaatagtcgcagttagtgaacccttaggcacagttttctcagtaaaaaaataatgtgatagttgataggataacctggagaatcccactaagtgctgatgtatagacactgtttcaatcttctcacattcatctgacttccctccagcctacctcagtgctgtgttatcctgtgtatggacagattgcatgtcagattcctaattttcaaatcaattttcaaattaataatttaataataatgtcttatacttatgtatatttcaaatcaaccctggtaaatctgatacttgtgttttatagtcaaagttgagcattttatgaatgcaccttgtaaatatcacatatcaggcaagcactagaaaaccaaatcacaaactgaaccaggttatcttccaacatttgccaaaatgagatgcaacacatctgagggaaatatgtattaatctttcttgtaagttatctgaattggtttaatggaaataaaattttaaaaactaaaatatattataaattctcatggatctgtctacattggtttataatttattttttcattagatttataaaggggcaatgtaaaaattaacatcagaatatcttatataacccattttatccattgtaataaagtttattgaacacctgctatgtataacttttgttttatttccttttaaataatagaaactgtattaactattgggtttcacattttcctttggcttccatgaagctcctgcctaaattttttgctcaggcacagaaatgaatttatctaggttaactggataacagtgcatcgacctctattttacttatagtagaattttatctacatattatttcctgttctgttttatatacctttagcagtgtaagctaccttaagcctttgcagaaatcaaatgaactataagtcatatatgaataaataaatgctaggtctaatatagaaaaattaataccttgaaataaaggtttattgagtcttttttcagagaagaagcattcctctaatgaaaaatattaatcagaaccatatttgctaattaataatttaatgataatgtcttatgcttatgtacattaaatatatttatatataaatgataataataatgcctcacacttatgtacattaaatgcatataatatataattatatatctatattatcacttctcacagtgaccttaggaggtagacattttttctcaaattaagtgtgaaaaattagaattcacaaattccaggatttgaactaaagacaactaattctacataaagtggttcatctgtaaaatttagtgtttagaactaatgtttgctatttgcatagggctgcagtatgaaagagtgttgggaaatgtcattagcccgttcttgctttgctataaatatctgagactgtgtaatttataaagaaaataggtttaattggctcatggctctgcacgctgtacaagtacggtgctggcatctgctcagcttctggggaggcctcagggagcttttactcatggcagaaggcaaagcaggagcttgaacatcacatggaaagagtaagagtaagggagaatgtggtgggggagtgccacacttttaaacaaccagatctcatgagagttcactcagtattgccaagatagcaccaagcgggtaatgctaaacattcatgagaaaactacccacatgatccactcagctcccatcaggccccacctccaatactggggatgacaattcaacatgagatttaggcagtgacacatatccaaactacatcaggaggtaaggcatttagatatatgtgtagacttcaaacctccttgctgtctcttcagtcctctaaaatgaggtgtgtctaaagaaacaaaagctttcatacagacctgtaccctagtggagatactgagtcatgttgacaaggattaaactagtctatataggccatcacataaaaataagctttatttagccagacaacagtaaccattgtgttcacaagaacacatacatacaagcatggctgtttgctcatagtaaaattttctttcctctagccatcaaattatcttgaaaatttgctgaactcttcactgtactaacttaaaaagaccatgcaagacttataataactcattgcatgaagatgcctaagtcattaatgtgacattttttttagaaagacagccttccacaaatctatttctaaatattagaggaaattgtgaaatatggttcagatatgatagagaatcatagcccatagttttttcctggtgtaataagacttgtaacattttcaagaaatcaagtttaaagtcaatccataactctaagaagaatcctacagcctccctaaaatttgaaattatatatatacctatacacacacacacacaaacacacacgcacacacacaaacatatatatatgaaaagactctattaagataaaaatactacctagaagcctaatggggaaaatatggttaagtttgctcacactgaattggaacaaaataggattgaaattttattccaccatttaaaaagcatatgacttgggaaaattacataacttcttcacatgtcaatttcttgagctataaaaagagttcaataatataatttatctcatgaggttgttgtgaggattaattgtgataaggcatgtgaaatgtttcactcattgtttttgtaagtattgagtaaaatcactgaactggtgataaaataccaggtataaaactgacaatctatccaaattgatttttgtcttaacacattcagggcagaagaaaatgagaaaaaataaaacaggccgggcgccgtggctcacacctgtaatcccagcactttgggaggctgaggcgggctgatcaagaggtcaggagttctagaccagcctggccaacatggtgaaaccccgtctctactaaaatacaaaaatattagccagacgtggtggcttgtgcctgtagtcccagctactcgggaggctaaggcaggggaatcgcttgaacccaggaggcagaggttgcagtgagccgagattgtgccactgcactccagcctggcaacagagtgagactctgtctcaaaaaaaaaaaaggagagaaaaagaaaaaacaaaaccaaaccctaaaaacatggatacccaaatagagtaaattaagaatctagagacattagttatctgaaaactattcagaaactctgcacaaacttttgatattggattgattaactttgataatgaccttatttttggagtaaagtgaacacaaatatcagtgtattagcccatcctaaaatattatttcataaaaaattaattcatcataaaataacactacatatcaccctgctttcattttcttaactacattatagaatgatagcacatttagaagatgatgtcatctttcaattaataaagatagttgtgcctcttagagaaaggtaataatttcaagaagctggatgagctgcaaatctacacaaatatttttaagaacatatatctatttaacaattttgtgctctctcaattttatttttgctgtttttagacatatggatgtttctatttttgaaattctttcttgtttttgtttgtgatttctgttttttagtcttcctccaccaaagctgtttagtaatctagtttttttccatttcattatttgattagttatatttgattattaatctatcaaaaattacttcttcagttgtgcaacgtggcgatcaaaattgattctcaagtaaatacctcaggttcctagtaccaattattgtctcatcttaatatttattccttagtttattatttctcctttatttatattaattatttatgtattgtacaatataactcctacatatataacaggttatatttttgcattgccatttctggttgattggtctgtctattcgtaggttaataccagaccattttattgattttattcttacatttccagatcttctcttttgggcaatactttctgatttgaaaggaagtagtgaaaaagttttacaaaacagagaggaggaacatgtgttgatcagtcacatggtttgtaaagcaaaatattggggtttgttgtatagtgtttacttattttaaatattaattttttctattcaaagaaaatatttaatggtgaaaatcatgaattttggatatagatgtgggttcgaatttgaactttgtaacttaatggttttttaatctctggtaaaatccattaaattctttcaagctccttcctctctgaatgggattattaatatgaatctcatcagtttagaatgagtcctaagtgagattacagaggaataaataaagcacagcttacttgtgattgtaagttcctgtcttcttatattaataagaaaaataaaacgaaatagtgctaaagtgttgggacagcgaaaatttttggagatggtatggagagataatgggcgatgtttctcagggctgcttcgagcgggattaggggcggtgtgggaacctagagtgggagagattaagctgaaggaagattttgtggtaaggggtgatattgtggggttgttagaaggaacatttgtaatttagaattattggtgatggcctggatacggttttgtatgaattgaaaaactaaatggaataagagaaggagaaaaacaggtataaaaggtctaagaattgggacgactcaggacatctgattagagagtgcctaaggaggttcagcatagtcctgccagcaaagattatttatttacttcaagagttaagagtggcagtttggggatagcaccaggaggtatcagctttgatgacttggagaaacagtgtaaaccggcagtgtaaacaagagcagggcatgcatgagtagttgagaacggtgaataggagtatgactagacacaagatagtaggaatgacaagttttttgggggcacagtctaagttgatctggtgtctggaatgagactggggcctaataaaaaggagcgtctatacaggagctcaaatggcctgtaccttgtagcattctgaggacaggtctgacttctgagaagggtaagtggtaaaagtattgtccagtcctttttaagttggtggctgagcttggtgaggtgtgtttttaaaagacctttagtccattctacttttcctgaagacggaggaccataaaggatataaaggtttcactgaatactaagagcctgaaaaactgcttggctgatttgactaataaaggctggtctgttatcagactgtatagaggtgggaaggctaaactgaggagttatgtctgacagaagggaagaaatgactgcggtggccttctcagaccctgtaggaaaggactctacctatccagtgaaagtgtctacctaggctaagaggtattttagttatctgactcggggcatgttgagtaaagctaatttgccagtcctgggtgggggcaaatcctcgagcttgatgtgtagggaagggagggggcctgaataatccctgaggagtagtagaatagcagatggaacactgagaagttatttccttgaggatagatttccatgatggaaaggaaatgagagcttctaagaggcgggctagtggcttgtactatagcatagcctgcctttgcttgtgtgtggcgattaggcctggtggaactgccatcaataaatcaagcgtgatcagggtgaggaacaggaaagaaggaaatatggggaaatggggtgaatgtcaggtggatcagagagatacagtcatgggggtcaggtgtggtatcaggaataatgtgggaggccagattgaagtccgggccaggaacaatggtaattgtgggacttaacaaagagtgagtacagctgaaggagccagggagcagaaagtatatgcgtcagctatgaggaagaaaatagattttggaagttatgagaaatgtagagagtaagttgagcatagtttgtgattttgagggcctctaaaagtattagggcggcagcagccgctgcacgcagacatgacggctaggctaaaacagtaagatccagttgtttgcgcagaaaggctacagggtgcagtcctggctcttgtgtaagaattctgaccacactaaccatgcctaggaaggaaaggagttgttgttttgtaagggattgaggtttgggagattaatcggatacgatcagcaaggaaagcacgtgtgtttttatgagaattatgccgagataggtaacagatgaggatgaagtttgggcttgactgaagtaatgggggctgtctgtgaagccttgcggcagtacagcccaggtaatttgctgagcctaatgggtatcagggtcagtccaagtgaaagcgaagagaggctgggatgacgggtgcaaaggaatagtaaagaaagcatgtttgagatccagaacagaataatggattgtggagggaggtattgaggataggagagaggatagggtttggcaccatgaggtggataggcaaaacaatttggttgataaggcatagatcctgaactaacttgtaaggcttgtctggttttaggacaggtaaaatgggggaattgtaaggagagtttataggctttaaaaggccatgctgtagcaggcaagtgatagcaggctttaatcctttcaaagcatgctatgggatgtgatattggcattgagtggggtaagggtgattaggttttaatgagatggtaaggggtgcatgatcggtcgccaaggagggagtagaagtatcttatacttgtgggttaaggtggggtaatacaagaggaggacgcaaaggaggctttggattgggaagaagggcagcaatgagatgtagctgtaatccaggaatagtcagggaagcagacaatttagttaaagtgtctcggcctaataagggaactgggcaggtggggataactaaaaggagtgcttaaaagagtattgtctaagttggcatgagagtgggggttttaagaggtttagaagcctggccgtcaatacccacaacagttatggaggcaagggaaacaggcccttgaaaagaaggtaatgtggagtgggtagcctcagtattgattaagaaggggacagacttaccctccactgtgagagttacccgaagctcggcgtccctgatggtctagggggcttccgaggcgatccgacagcatcagtcttcagccgctaagccaagaagatctgggaaggagtcagagagccttcggccagagttccaggggctctgggagtggctgccaggtgagttggacagtccgatttctagtggtgtcctgcacagatgggactcggcttaggaggaatcctgggctgcaggcattccttggcctggtggccagatttctggcacttgtagcaagctcctgggggaggaggttctggaggaacgcctggtcgctgcgtttcagatgtttggaagttcttgtgtgctggagatgtggctggggtttgtctcacagtggaggcaaggaattgcaacttttttctattattgtacacgttgaaggcgaggttaattaaatcctgttgtggggtttgagggccagaatttaatttttggagttgtatttaatgtcgggagcagactgggtaataaaatgtattttgagaataagacggccttttgacctttcagggtctagggctgtaaagtgtctcagggttgctgccaaacgagccatgaactgggctggatttttcatatttgatgaaagagcctaaacgcacactgatttgggagaggtctgataaggaaaaaggagcattaaccttgactatgcctttagcttcagccacctttttaagagtaaattgctgagcaggtgccggagggctagaggtggaacgaaactgtaagccggaccgggtgtgaggaggggaggtgataaaaggattatagggtggaggagtggaggctgaggaagaattgggacctagctcagcctggccaggaggggagaggtagaaaaggaagattagaaagactcagcgaagcttggggttgggactgaggggacaggtgggagggaaagaaggaagatttgggatgagttacattgggaacagagactagagatgcactgacatgtaaaagagtgcctggacatcaggcacctcagaccatttgcccattttacgacaataattatttagatcttgcaggatggaaaaattgaaagtgccattttctggctatttggaactactgtcgagtttgtattggggtcaagtggcattgcagaagaaaataagacgcttagattttaggtcaggtgagaggtgaagaggttttaagttcttaataacacaggctaaaggagaagaaggaggaatggagggtggatggttgcccatagtgaaggaggctagcccagagaaaagagtagagacacggagaagggttgggggttcttgccctccagaaaagcagagaaggggttggggcacagagatacgaggtcagggcacggaaataagggatcggggtgcagagatataagaggttggggcacggaaataagggatcggggcacagagatataagaggctggggcacggaaataagggatcggggcacagagatataagaggctggggcatggaaataaggggtcggggcacagagatataagaggctggggcacggaaataagggatcagggcgcagagatataagaggtccgggtgcggaaataagggatcgaggcgcagagatatgaggttggagtatttgcccctcctctagaaaagcaggacttgccgctcagggtgaaggagaaggggttgggggtttcttgccccccagaaaggcggagaagacacggagagaaggggttggggtacttgccctttccccagaaaagtgggacttgccgctaagggtgaaggaccaaggcaggcatccctgcgtggtctgacacctctgaaacctgggtgaataatcagggacgcatccctggaatgattaaacaccaggggaaggctgccttccctagtccatgaccagcgccggagttttgggtccagggataaaacgtgtctcctttgtctctaccagaaaatgaaaggaattgaaattaaaagaagggagagattgacgtgtggcgccaagattgaaaggagaaagaggttgagggatggtgagggaggttggagaagagagtaaaaaggggctgcttaccggattttaaattggtgagatgtttactgggctggtcggtctgaggacctgaggtcgtacgtggatctttctcacgagcaaagaacaggaggacaggggattgatctcccaagggaagtcccctgatccgagtcacggcaccaaatttcatgcgcctccgtgtgaagagaccaccaaacaggctttgtgtgagcaataaaagcttttaatcacctgggtgcaggcaggctgagtccgaaaagagagtcagtgaagggagaaaggggtggggccgttttacaggatttgggtaggtaaaggaaaattacagtcaaagggagggttgttccctggcggtcagagtgggggtcacaaggtactcagtgggggagcttttgagccaggatgagccaggagaaggaatttcacaaaacaatgtcatcagttaaggcaggaacaggccattttcacttcttttgtggtggaatgtcatcagttaaggcaggaaccggccatctggatgtgtacgtgcaggtcacaggggatatgatggcttagcttgggctcagaggcctgacagtaagtgttcagtaaatgtaattagtataattattaaaatattcatgattattattcctttaaaatattctagaaatcttcatgttatctaatctggaaaagaatttttctagctccattgctaaaaaaattcttcaaattcaaatttatttctgtatctcttaatagaaatgaggaaacgtatttcctcttcctgtaatagtagtctcagaacacgtgactgtcacttgtgtgtctctgtgagtgactgtgtggaaagaacttatctgactcactcacttctctgtgccttggctttgggtatatggctgcaagtctctgctaattactcctatgccactttcagcacaaatatcacttattatgtgctgcttgaatattattttctttatttctaagtttggtccattcagtcctctcatggcatgagttgcttttcttatttccacataagtatttgaaaacttgtcagaatgctattttcattagacacttttcattattacgctgtcatcactgaacaagtttatttcaaagccttttgagaaaaatgacagaaaacatagcattttatttccttggccgttcattagattagaaatgtcaagaaagacttagattatacttatttttattaaaaggaatgagagacttttcttgaaaaaaagaaaaaaagaaatttaaattttgaatgctacgtcttagggctctatgcagtgaaacattttctcttcattgtttagaaagacttacattttattttaaaattcctgcccgtctttttctcttgaagagataagatactctaatcattctagaacaccagctattaatctgaaattaaatctattacgtgccagaaacaaattaccccaaagttaacctaaaatatcatcagggtaacaccttcagttacaaattatagtaacatcttagataataaatttcagcagctattaaaagagagatgataatagtacctttgtctgaggcttcttatgataattgactttaaatatgtagagcatctaatactgcatgtgaggctgaattctatgaaattactaatactgaagcatttttggcctacagaaggaacggtttcatgtggttcaaccgaagtgttgctcgttaattttgagtttcccattcaccactgcactgacctttagccaggacagtacttactaattataatttaaaggtcgcatggatagagagcaaggcagacttgttacgacaaacctgtgtcttgtctatcttggtatggtggtgcctcagttagcacagggctttcactctcttactatggccagcttcacagtctctgtgacccttcaacctgtcccatgacttctgcttacccgtggccatggtgtctactgatggcatcactatgctcactgccttcacccatatgattctcatatgtgtaatttactagccagtatccagcaaggcctgctgtgtatgggagctggtgccatagaaagtgtggatgaggttatgtgtaggtatctctgctggtggtgggttgatgataaccatatttgacgcccttaaatttctaaaattaggagtcattgtattcattctagattgaggaggatagcatttaaatggggcttaagtatgccttgtaagtatgtaaaaagatataaaattaccatgcatactgtctttcaataacataacaagactgtagtttagtgagctcaaggtgacaaaatagccattattttcttactgtgagagtcattttgtttattgtttgcatgagtgacaatttttccaatgaaactttcttggttaatagaccctttcttatacataaatatgaaataagagggtgatagaaatcagatattatatctagtttttatgactagcagattacacagaataaaaacatcacaatgacacaaaacataatcttacacattagacaaaggcatacaactttaaaaaatattgcaatcaaaaagatgtaattaaattaccctgattcattgaaactttagcttttaaaaggttcatttttgtgggtataaataaattttgttatcttaattttatacaagttacaattatattattgttaatgacagataccaaatttaataatgtcaccttgttttatgttttataaaatttgcttcatttttccacctaagcagatatgctgtcaaaatgtggtgttacctgaaattttaaaatgcatctcttttccttgtgtaattttataataaaatagttaagaatgaagaattataaaaaagttaagaattttattttgaagactgatattctaagttgcatatagcaaagaagttacgaacttttatagtcaaggacctcataacacatgatagatgctaattttaattaaatttattatttcaactttgaaaaatggggtaggaggagagtatgaatcagaggatgaagtaactcacaatttaggctataggggccacatttttctaacttaatattccatgattatttccaaaggttacttaaatccaatatatgactcagagcttcagacttaacgtcatacattttcacataggttttaatttgtggagaaaggacatattctgatattattatagaaaagccattggattctatggtgtgataataagagatttcaggtctgggtcttctttatcagtcagcttttgtattgcaataacctacaatctcaattctcaaaggcttagagcaagatcatttgctttttgttcatctgaggactgccgggtgagtttgggttggctgggctcagtttcactgggcttttgattccaggagcccagagtgaagcagcagccactatcctgcagttttcaacgcagaggacataccaggggagacagaggctgagccaaatcaaataatcacattgaaaccttttgcttaatcataccaatgtcatggctgctcatattcattagccaaagcagccacatgacttggcagaagttcatagggttctgatgcttattcctcccatagaatgaacaggaattctcatataactataattgactatatcaaatcccattgctggaagtgggtgaatagctgggaatagtaatccactgtattacatatgccaccaaatgattcagcaactttccagtttcctactggacagagagaggcctgtctctctggaaagtcgctcctcctttatatgaccgccctgacagaccttgcacttgcaacttgactccctgctgaaaaccacttctactctgttttcggaaatacctgtagtgtcagtagacaaagtagaacaaaatgagaaaatagagagaggatgggatctgaaaactagtataagtcagggcaggaaaaaaggaagagtctgaaagcaagcttggagagctgactcttagaccagaatagaaaacattttcttcaaaatattcgccccttttcaaatgcagaattaggccagttatgttttaggatacccattgccttatattcttaaaaagaaaagaaaaagaaggaaaagaaagagataacacttaatagtccataacaaagtgtcaacgggatagacacatgcttattcaaaccacagatatgatccagttaatttccttcttaaaatgtgcccatagtgtcttattgcctcatcgtaatgataataatgagagcaacaattataatggcaaaagcaaggactcctgccatttactgtttgtgtattaaatgctccactctacactaaaagctttatgtacagtcttattcctcaaaataaatatgagaaaaacaactttaccaaactcacatagttaataaaagtatttttatgagccaccacaatactcaaaaatggtgcaatactgtgttttcatgaatttcacccaatctagctttcctgactcatctcttgccttcccctctgtgattgctaagtacagacacacagaagtgctgccatttcctcactatactctactatttcacgcctctgtgagtctgtatccatgaatttctccacttggaatggcttttctagccacactactcctttgccaacctaacaaattctgtttctcttctaatgactcttctagacgcagtcctctgccacctgctctaggaaggtatgccataggtagataagttgtctcctgcatttgcttgcagtctccacacactgcagcgatcacatacacctgcacataaaatgtctttgctatacatgcccattcctgggcccacacaagtcttccacccttcctcaggtgtgaataccttaagggtcttctttattcctattttattttatattccagtgtatgttctaacaagtaatcaagtgacttgaatggaaatctcaatagccaaactgagttgttgctgtacatttttaatatttaacagagagatggatctattggaggcagtcatctgagatgatcagatataatggccaatagcaactatgctaatcataaaatttaaaatgtaaaaaattgcttcgtcaaactgttttaaaagatgtatctaaaacatagtaggctgagcatggtgactcatgcctttaatcctagcacattgggaggccaaggtagcaggattgcttgaacctaggagtttgagatgagcctgagaaacatagtgcaaccctgtcactacaaaaaaaaaaaattaaaaattagctccatgtggtggcatgcacctgtagtcccagctatttgggaggctgacatgggaggatttcttgagcccaggaagtcgaggctgcagtgagctgtgatcatgccactgaactccagcctgggtgacagaacaagacactgactcataacaaaacagaacaaaacaaaaagcaaagtcaagatttggatgttcagtgtattcattgctacttgcacacacacacacacacacacacacacacacacaagcaaacacacacaatatagttttatcagaatacacatattctgatagcagaattgaaagcttacataactgtgcaagctttggattctgctattctctggtttactcatccccagttttccaatccatcaataaggatagcctcaattatctaataagcatttcatgtgtatttcaataaaataatgcattttaatgaaaaattcttagaatagttcttggcacatgccatatttaaatgtcgccactgcctcattcatacagatcgtacccaagtaaaagtgtatatatggagaataaaaatgaaaacaggaagtaagacagtaaatggaggaagtcatttagatttgatagcatggtttccaaaggcagtgtcctattagaagtgttcaggtaaataaaacgttattggcagagacagatggtaaagccattttagaaataaaaattaaccaggtaagcacatgccaattttgggaaaacaatttattgtacctttttttctggagcttatttcaatgtaaaagtactttaaaaacttagaaaatagggtacatattaggtaaaagagagtcttgcaaaaatggatccagcaaatattagtgaagagaaaaagatgatcagaactctgagtttcagtgatttgtcttgtaccatattcaagctgtaatcactgaaggtaggaaacaaaccagcaaaacatttgtaaggtgatggtatcatttaaaaaaaatagagaaacattacagacaacttaaattggaaacaaattggaaacaatttttaaagttatataaacaccacatttcaaaaggattgcatgatatcagaatgggaatttctagtagaaagttgaaaaaaaaaatgagactcaagggagactgttagtgtggtggtaagattgggtagaataattcagatctcaaccatgggaataacctgttgaataatcatgtgaatactaacaggtcacaataatcccgtgaatgaacatgttgaatttcggcatagagagacagcattgttattgccaaaagagctgagtagaaaggaattttgtgatgagtgatttcaagctacatttctctgagtatcaatgtgcccatctggaaaatgcaacaataaacagccctcacataattgtgaatattaaaagattatttgaagtgtctaccactttgctgatagggattcaacaaaattaaatttttcataccgaagagtagaattttccgtcagtacctcatggggcatcaacaatgatgataagcagtagaggctgacttgatattagataacattaggtgaccagtgagccaagacattcacttctttggctttccttcagtaaagtaagttacctaaaatctgaattagagtaagcagatgttgacagggataaatgaataggaaaagcatgcagagagttaagaaagaaggcatctaggatatttgtcaagaaggattaaaggcaggttttatgtatgcaaacctggatggtgaaaatggatagtttactgtgctgacttcgttcagaggtggtataattagacagagagacaaagccgcaaatgtgacttaacttgggcacagactatgagatagttggcatttgtagctggaaagtgtaagggccggttccagaggtttgcactgtagcagtccattgtgatgacaagatcctggaattcatcatgagacagagtgaattatgtggagaaggaaagtgaaaacaagaaggatgaacccagtctggtggaatttatgtcttcctcccttctaaattttgactgtgaataaatcttgttgcaaaagaaaaggtcattattaatagcatcagtcatggatgaaaacaaattagaaaacttgtttgttttattgaacatgattcagcagcagaggtgatttgaaatatcctatagggaaggaattcatgcatgcataaagtgtgttggggcaaaccctactggaagcttctttgggtcataggtcttcctggccttttcatttgtgcagcctcttggcaggtcatcactactttctaattctaagtcctgaaaattgcctatgaggtaagtttctatttcattaaatgttctattaagacaagttttctattgtcagttttgttatgaccaaattcataaatggaacatataataaaatgttaggaaatttggacattttatttcatgattattgatttctaaatttatgtaaggtccattctgtgaaattcctagagaaatttaaagagttttctttagaatattttatttgcagttattgatacatgtaacaaaaatatgggtagtatttttgctttctatgacaaaatatttatagttaagatattaaaaatataacgaatattaattatacaaaaataatacattttagaatgataattcaaatacagaacccatcaaaatcaataactatatgttagtatcaataaaatgccaattaaaaatataagaaaatatgagaaaatactaagaaaatataagaaaataatttaagaaaacctcttaagagatagcttaagaaactttcttttacccataaaatcccatgccttaccacaacacggcaatgcagatatttccttcaattactggtgggaaaaaaaaacatgagatttgaaatatcaaataaaatgtgtaaaatcaaaaaaataaacagtaagctaaaacttggaggtttttattttttccctactacatctctaaggcgttgtgagattcatttaagctagaacaagtagaatgtgttctagaaatggcatccataggatagtttaataaccggaaaacaattatccacaatgtttcaaagcatacatttggtttgtttgtttttagcattttaatttgtaggttcattcaagttaccacatccaccaattaattgcaaaagacctagccacaggcaatagttgactacttttgctttcctttatttgaacaactgttattatgcagatttcttgttagaattattctgctgtaagagagtgaagtctacctaatttcatgaatataaagggggagatgaattatgagaaatatacaggagtactccatgaaacccagcaacaaaaagtacaactggaaattacaaccagagccagaagcaagagtggtataggaagaaagatggctacttcttacatctctgcctctttttcttatctttctatatatctgctctgtttccctttctgtgtcagtaaggcaataccttctgctgtttacaaggccccaaaatgactgttttacttatacctaggtgtacttgactttccattttcaaaaactatcacgtacttccagatgtaaaaggattatgtctcttggattaaattctagaggaataaaatgggattggcccaggtgttctaatggacagtatttctttctgtgagaatgaagggaagagacagcagaatatgaacatggaagccctggcccaatactttagcctaagccagtggttttcaaacttgagtccccatcagaatcactgggaggctgtgttaagacacagattgccagcaagttttcaggtgataataaggtcactggaccagagaacatactttgaaaatcactagttatgctgtgggattgtaacagttctcaacaagaggaaatggacaaatattccaacgatgtgctatctgtacctttttgtgcaattgagccgctttgattatccagcaatttttttttttttggagacgtggtcttgctctgtcacccagactggagtgcagtggtgtgatctcggcctcagctcactgcagcctccacctcctgggttcaagcgattctcctgtctcagcttcccaagtagctgggattataggtgtgcaccaccattgcctgactaatttttgtattttcagtagagacagggtttcactatgttggccatgctgatctcgaactcctgacctcaagtgatccacctgcctcgcccttccagagtgctgagattacaggcgtgggccaccatacctggtctatccagctatttgtcttcattcatttattaaagaattattgagaagttactatataagaaaatagacatttatattcctatatatacaaaaattaattccttaataaatatagttcatgtatgtgcctggatactaagcctcacagcacatattattatacattttttaatatgtaataccattttactattttattatctaagtacagaacaatcaaattttcagaaaatgcaatcatttatattttatgctttatttattttcccaaatatttatgcataccatatgtgttatattgtaaataaaaacaaaacaagtgaaatagcttgttgatgttggaggttctcttatttacaataatttttcttcatgaagaaagatgtgtacccatatagtgatggatcaaatataaagtttacttgttaccatatattaagggtcaaaatatcctgagaggaataaactctctaaactgtttcttctgaaacctggttccacagtaacatagtctcctgatttacgaatataaagccaatcaatcctcagagatgagccattcttttcgtcactgctactctcttttgaagtgacattttcctagctgcataatctgagataatgtttggttgtataaaatatgctactattatcacatgtatgtgctgaaaaattacaaataagccatgtttcttaattatgttatcatactgagtgatatggtttggctctgtgtccctacccaagtctcatgtcaagttgtaatcgcgaagtgttgagggagagacctggtgggaggttattggatcttggaggtggtttcccccatgctgctctcatgatagtgagggagttctcatgaaatctgatggtttaaaagtggaagtttcccctgcacgctgtctctctcctgccaccttgtaagaatgtgcttgcttatccttcaccttttactgtgattgtaagtttcctgaggcctccccaatcatgcataactgtgagtcaattagacctctttcctttataaatttaccactctcaggtagtatctttatagcagtgtgagaattgattaatacagagaattggtaccgagagtggggtactgctttaaagataacctgaaaatgtggaagtaactttggaactgggtaacaggcagagattggaacagtttggagggctctgaagaaggcaggaagatgtggggaaggtcagaatttcctagaggtatgttgaatggtgttgaccaaaatgctatagtgatatggacaattaagtccaggccttggtagtcacagatgcagatgaggaacttcgtgagaactggagtaaaggtcacttatgctgtgctttagcaaaaagcctggcagcattttgcccctgccctagagctctgtggaacttcaaacttaggagagatgatttagggtatctggtggaagaaatttctaagcaacaaagcattgaagacgtgacctggctgagtctgaaagcattcagtcatatgcattcacaaagagattacctaaaactgatacttatattttaaaggaaagcagagcataaaagtttggaaaatttgcagcgtgaccatgtagaaaagaaaaacctattttcttgggagaaattcaagccagctgctgaaatttatgttaagtaatgaggagctgaatgttaatagccaagagaatgaggaaaatgtctccaggccacatcagagatcttgacagcagcccctcccatcacagacctgtagtcctaggagggaaaaatagtttcctgggccaagcccagggcgatgctgttctgtgtaacctcgggacttggtgccctgtgtcccagccactctagcttttgctgtggctaaaaggaggccaaggagcagcttgagccattgcttcagagggtgcaagccccaagccttggcagcttccacatgtgttgggcctgagggtgcatagaagacaagagttgagttttaggagcctccacctagatttcagaggacataaggaaacatctggatgtccaggcagaaatttacttcatgggcagagccctcatggagaacctcaattagggcaatgcagaggggaaatgtggggttggagcctgaacacagagtccccacctggggcactgcctagtggagctgtgagaaaaaggccactgtcctccagaccctgaaacagtagatccacagacagcttggattttgtgcttggaaaagttgcaggcactcaatgccagcccatgaaagtagccatgggggctgtatcctgcagagccacagaggtagagctgttcaaggccttgggagcctcccctccttgcatcagcatgctctggatgtgagacatggagtcaaaagagattattttgaagctataagatttaatggccagcctgctggaattggacttgaatggggcctgtagcccctttgttttcatctatttctccgttttggaatgagagcatttgtcccgtgcctgcacccccactctatcttggaattagctaacttgttttttattttaaaggcttatagaaggaagggacttaccttgtctaagatgagactttggactttaacttttgggttaatcctggaattagttaatactttaggggactgttgagaaggcatgactggtttcgaagtgtgaaaaggacatgacatttggaaggtggcagaggtggaataatatggttgggctctgtgttcccacccaaatctcatctcaaattgtaatccccacgttttgagggagagacttggtgagaggtgattggttcatggcagtggtttctcccaggctgttcttgagatagtgaaggagttctcacaggatataattgtttaaaagggctagtttcctctgcacactctttctcctgccaccatgtcagacgtgccttgcttcccctttgccttctgccatgattgtaagtttcctgaggcctccccagccacatggaactgtgagtcaattaaacctcttttgtttgtaaattacccagtgtcaggtagtatctttatagcagtgtgagaatggaataatacacttagttactgagattaatattcaaaaaattaataacattttattgataagaatcacaatgttatgtgaaaagttcccacaatttttctatgtgtaactcaattagaactagccccttctgcttgcctgctctcatttaagtcatctctcaactcccaactatatcccaaatacacatgcaattataataaataatatagaatttatagttttatgaagagataaaaatgagagggagggcacaccaaaaaatcacacaattatgcttcttaaatttccctattacctatatgcagtaattattaaaatttcctttcccaaactagctactacatcactctactcaaatcttctaaaaatttctagggtatcggtttctttttctcctcaacagaaagtctcaaaattctgataactcatatattgtagtctgcaaaggttgtagctgaacagttttagaaattcagtctttagctcagaactattctgctgagggagactaaatttattttcttccaaataaaataaatattatgtctctatttgaaaatgtatcctgtaatacctagacatgttttttcatagaaggttttgaatattttatgtttgaaaggcattgaaaccaatgattctatggataggaagaaatgaaattaaactgactaatgaacaagcacctctgaaaaatttcaagaataatttttaaatattcgactgcattgattgttagaaacatgctcagtgtgtgtgttgctgtttcttttattgttctgcttggaaagcgtgaaggacccagaagggtgataattttccacactggtcctctcctgtccctgccactcagccatttcatttcaacccctttagcacatgaccttagccactaacttctttttcaccagtcatgataaactcaaactagtggatctaattagctattagcacagctaataatcgtgagaacaaactttgtctcttccatgcattttaaaccataattcctaaaatgatcagaacttcagctgacccccttggtaaccatcactaaaatccttgcccccctcaattgcacgttagacaactcctttggtctttacttatctgacattttttcaaaatggcctatagtatcagtgctctggataatttccttcccctagatggttccaggaaatccagttgagcaaagtcatacttttgtatgccttttaagatacagaaagaaatatttcttctcttccaatgcatataacatttttccaatatgtacaaatcaaaatttctattggtaataaaaaacaagcaaccaactaccaagcaagaaaatattacatcagcaattgtttttatgataaattttgccaaataacaaatagatttcttgatggcagctactactgaaaaagcttcatatttaatcaaagtttagtaacagtgtgaaaatgaggggaagttggggttaaggatgatgtcattgttttagtcgctgtgataaaaaataatagacatctaattttggcattgtttaaaaaatatgattttacatttagaaatacttagttttaggtaggaacaaggcatgtgcttacaaatatgcagaaagtaattgggaatatatataagaatcaccttaactatctgatccttaaaaccttaataacaattgtgccaggcaaggtgtgagagccctggcatcacaaagtggtgggcttgtgggtagtggggtagtaagaagaacttaccaacaacattatagttttgaaagggaaagttttggccaggcgtggtggctcatgcatgtaatcccagcactttgggaggatgaggcggacaaatcatgaggtcaggagttcaaggccagcctggccaatatggtgaaaccctgtctctaccaaagatacaaaaaaattagccgggcttggtgacgtgcgcctgtgatcccagctaattgagaggctgaggcaagagaatcccttgaaggaaaggagggagggagtgagcgagggagggagggaggaaggaaggaaggaaggaaggacggaaggaaggaaataaaaagcctcatgtttaaaatgattcttcgctctcttctgacttgtaaatctccctttctcccttactcttaagcgtagttccatttcattgtcttctcttcttcaattctaacctctctggagaaatatgaaagaaaatcgtagaaaaatataatcttgggtttttttatcagagtaattcagctttttctaacctcatgggcagattaggccttacattttcaagtaaaactttgaaatgataatttgtaaaggcctgtccgattaactatttagataaaaatttacctcttgtagcttcctagaggttgtagacagagcagggtatggttggcttcatttttctcacttacaagtagagaacggaaaatctggaatgagatcagggataccatatgggattggaaatcacctgtgaaataatatttgtaaagccaattaaagagagtcaaagacagacctctaagtgcaagtataaagggaaaatagaaacatctcaatgttcacccatttaagggacagggaaatacattaaatccagataaattacctgagaggtaatcataatagttgtgtgagttagtgcaattatcttaatttacttatagagaaagtgagatacagaaatgaacggagctaaatgaagaagtcattatcaaatgtctttgacttaaagactgtgtcctttttaggacagtaggacctccctaatgaatttattctccttcgcagggtcagaattgagaataagtaagttagaaagtgatttcactttggtagattccaatgctgtcagtcaacaagagaagaataaaaacattgccctgtagaaaagcaatctatccaggccaggaggggtggctcatgcctgtaatcccagcactttgggaggccgaggtgggcagatcacctgaggtcaggagtttgaaaccagtctggccaacgtgatgaaaccccatctctactaaaaaatacaaaaactaaaaattagctgggcgtggtggcgggcgcctgtaatcccagctcctcagaggctgagacaggagagtcgcttgaaccaaggaggcagaggttgcagtgagccgagatcatgccactgcactccagcctgggcaatacagtgagactccatctgaaaaataaaaaaaaaagaaagaaagaaagaaagaaaagaaaagtaatctatccagtaaattgagtaacttaatatgtttttattattctttccattagtctaataaatagttggcaagaatgatggtgggagcaatccaaacgttgacaatgaaaacagagacatgaggaaacagaaatagcacgtggggttatctgatggtagggaagaaagcctgaaataatagggtaaagtgcaagtgaagcgaggaagcgagaaaaaacgaagcagaaggagttgaaatgccagaggtgtcagttactaacaacacatttaatgtgagagaggcagatcgttgtggaagctagaggtgatagccattcaaagcagatagggggatcgcagcctatgatgctccaaatgctactgccaaatgacagccactggaaatgccactctggtcattgtatcataagatgttaaaggtttgccattcattagtttcaaaggaatctgaatgagtaaccacattcattatagagacaaacaacagattatgaatgtgtactttaatactttaggggctgaaaggagaaaaaaacaaagacaataaaattctaatggctgtatttaaaagtgaacattgtgtgagtctaagaaagctaacagttcacagttcagtttgtcttaaaaaatatgtgtgtctgtgtataacgctcgtattacatatatctcatattaccatgttatataactatcatacataataccattatgacataataccattatgtatgtatgtactatagattattaccattatgtatggttatttacattatacattatatgccatttaataacatttaaagtgttataaagatgcaattttaaattacaagtggatttgtgacaagataattgaatccacaatttatgtcaacagagttggaaattgttgaggcatgtttctaaacttttaaaataggtcttcatttgagtagattttctttttttttctttctttcttttttttttttttccttgagacagggtttcactcccgtcatccagactggagtgcagtggtgtgatctcagctcgctacaacttctgcctcctgggctcaagtgattctcatgcctcagcctcctgagtagctgggattacaggcatgcaccacagtgcccagctaatttttgtatttttttatagagacggggttttgccatgttggccaggctgatctcaaactcttgagcttaagtgattcacctaccttggcctcccaaaatgctatgattataggcatgagccactgcgcctgtgctgagtatattttcaaatgtagaatactgaattcagtgcaatttgatcatattttgaaaatttctgcattattatgttgttgtattggaacatttgggttttcgtagttgttttgttttgtgtccctaaggggagatgaaccttctttgtttgcttgaagaatacataacatatgggtcttggtggttgagaagaccatggaagcctaaaagaacaaatttgccctctcccagcctcgcttgcaattagctattaaagttctatgggtgatacacatattatcaaagtttactgttagggaaagccagagcataagccataatcacatgacttcagctgagccaattgtaagcaccagactgagaacaaataatgcaaggagagaagattagcaaaggctccctttgggacctggcagttcacagtgatacttagagacaaaggcaatgtaagctgaagcagctagtactgagaaaaagtagcattattgtcttcactagacagtgaagtgtggagtggtttttgactttgatcctgagtgtctagccttccattgttgcttctggttttctgagccagtgtttgaaagcatcccacagttctatatgctaacacaattaactcttaaaaaattctgtttttctttaaatcccccagagttagcttctgttgccttcaactaaaaaccttgacaagtacagtagataaggcatggtttgggatcacaacttgattttttttattttgggaatacaaatttaacttgtggagagactgatgttctctatctcaccaaaaattgtttttgttataagctgtattcataagtgagctgtaatgttaaagagaaaaaagaaaaggattttaaattgctttctgcagcagaatgggaggcagtaaaaaggacaaactgctaaacagagaaaacaagacaatagaaaggaaagactgttctaaggaggagctgacagggctgctatgaaagaaatgtagagtctggctttaaattgcacatgtgacaagaaagatgtgatggaaaaaaaaatgtttgtttactcacactccgtccacatcctcactgcaacacacccacagcacactcttctaaggaaggttcacattgctgaattttttttttttttttttttagttgggtgtatagctgccttcaataaaatatttagtcacatacttgaacacagtgtgaagtcataggtatttgtgtatcacgacaacagcagataggtatttcaatatcaaaacaaaattggagaaacctgtgtagttgtaaaaaacactgcataaaataaagggagattgaggatgggtggtagagaggaggcaaatatcaggaaagaagggaagatgtccatgtctgatacggattttctcagctgtaaatgctgaggactgtttagtaaccctctttttatgtgctcatcaaatggacattaaaatatctatttgtcatagtggtttgtgagatatattcatatagcaattaatactgtgaagcgctgaaacttgctctaagttatacaaagagtggagacagagatagccaattggaagccggttacatctaggccatgtgttatttctgtatttacgtagtcttctctgtgtaattagaactgctataggtgctaattgaaggagaactttagatcctagatattataaaaaataaatagaaaataccattgctatggactgaatgtttgtgtccccaacatttatatcttgaaatttaaaccccaaggtgatgataataggaggtggagctattgggaggtgattagttcatggagttagtgcccttgttaaagaagccccagggaactgcgttggccttttcaccacgtgaggacacagggtgaaagcgccagctaatgatgaatcagaaagacttcatcagacactgaatctgtggatgccttgaacttggactttccagtctccagaactgtgagatgcacattcccgtggtttgcaaggcactgagtctacagtattttgttatagtagcactaatggactaagattactatgggggcataaatcctctaaaccagattttctatagatataaaaattaaaaagagctatgatacaaagagtccccatttgctctatatcccatgatttattcatttgatcaataaacatatgtgcagggatctaggtataacaacatgagaaagcaacaatcctcgtggaaatggtggaagcaagagaaattagaatttataaatgtgtagtggtcatacatggacttcataataatctagtgaaaaacaccacatgatttgttcttaatcatgttaatattataacttcttcagagctctcgctaaacacagcagcaagaaaatcagcctcaatcaactttgggagaacttttaactttgcctagtgtcagtcgaatgaatatccaggaagctcatgttatactcagaaaacaggaaagctctgaccattagtctgtggtgtttatcgtagttacctttgctctttctactataaggtggtgctgaatcttgtcctctgccctctattgaaaccctgaccctccacgcagaaatctttagaaccacagtttaatggctatcttttatggtcatcctatagtcagttaactaaccaattggaggtgccacaagtggaccaaataaatcttcatgttgcaaaggaattaaaaaacaaaacagtacctggacccagccctaagtaggagaggcatgactccatctcccctctggctgaataaccatccatcttataactccctgcctttcagagttcttttgtttacttctatctggatctgcttttccatctccaccaccaaaacagctcctgagtagagtggtctgtttttcaaacttgcaacctaaagacacccaaatgaaaagaggaaaatgaaagaataattcatttagttttttcttggaatagaattaagggaaaaatagctcacattctttcaagagggaacaaaaggtaaattaatattttaccatgttatccagtagcatatccattatttacgtggtcttattttattgattggtcaaaagattcacaagaagaagatagttcaacatacacctgtgttttgagggtgaaactcagctgaaatacactggaaacaatagctgtgaaagtctacaaggcaatgggagtgaaaagcataatttaaaaccatcatctttacctaatgatcaaagcctttggcctctaacagagattcttcatagcagttcacaaaagagtgccatactggggacataagagggtgggccaggtggggtggctcacgcctgtaatcccagaactttgggaggctgaggtgggcaggtcacgaggtcaggagatcgagacaatcctggccaacatggtcaaaccccgtctctactaaaatacaaaaaattggccaggcacggtggcacgcgcctgtggtcccaggcacttgggaggctgaggcaggggaatcgcttgaacctgggaggtggaggttgcagtgagctgagatggcgccactgcattccagcctggtgacagagcgagactccatctcaaatcaatcaatcaatcaatcaatcaatcaattagggtgtaatgggagagttaggaagggatcctatcctacagatggggtaaaggaaatgttatgtaaggtggcattggtaccacctattgattatgctaactgatgcattccaagttaccaaattagatctcttataaacttgaaattttatgattaagtattgctagttttggtttggaaaaatgatccaaaatttatgttgcataacttatagttaaaggaaaatgtagtacaatgatactgtattttactgttgaagtctttgtgttgggattaagtattaagaagaaaattactgttcaacataacaaccgaaagggtaaacatatttaaataattacttaaacaaatgtaaacattattaattccaactaactctgtatacactttccagcggttgcactgccttgttcagatagctgttgcttcatgtgtggcatggccaattggcttcatattatgaaggatgagaggcaacctgaactggccaaccatgacagcagacctttcttagggaagtcaagtccatcattgcctttttcactcttcagtttcaaatattgtaagatcttttatatgctgctgtctttgttaaacatgggaggctcaaacatgtcatcactcaggacttcatacctgattcctctttcagtgtttatggctactgtcttaccccaggctttcattttactcttattgggaccatttcaagggtcttctaactggactttctcccattactcactccatcctccacattttcacgatggttatttttaaattaggagtctaatcatgttgttcgtctgccccactgcctacagcgtaaactatagtttatgtatagaattttgtatagaattcttttgtatagaattcaagaccctccatattcaaccattaatgattcttgtccgtaagcacttagcacagtgctcaacgtatggcagacactgagtagataaatgtgtgctaggtaaaatgaattaagggcaattgagtggcccttccaccagatgatgtcctggtgtctagaaatagatgaattttgattgtttttggcaattatcttaaagatttcatatccagaaacttcaatttcataatttttctgattagcccattccattttattcagttgctttgatgataatcaataatagtaatattgttgacttcatacagaagaaaagaagataacttttaaacaattttaatatttccaaaagatgttttatgatcattttttacataaatattatattctttgaatagattatctgaaatagaattccaggaccaaagattatctaccactttaagccttagattgtaaaatggtctcttaaaaaagcacatcagctcagacccagatttataatgttctgactaaattataacattttatttaattgtcgataaaaagcacactgtttcacacataacacaaatttaactttttaaatttaaataccttaaagggtcaattattgcaaaagacagattgagacattcaacaaacatttcttgaatacctaatatgtacaagaccccatcccagaaaactatatagagttatagaaattaaattaagtgaaaaaatgagtatgtaaacatcaaaataaaaaagttagtttggagtcaaatgtaagcatttgttcttaaaaatattatggtttcctccaggattattctttagtagtacttgccaattttttctcagaatgtgttgtcctatggtttgctttttttaatttcacaaatgtcagaggtacaaaagagtcttacaccttttcttgcaggatttctaaaaatcgtatttagtcatcaagaccaaatttatcatcaaaccttaacccctgaaaccaagaaatttatgtatacattttatttatattttcatttatatttacatctcagcagtggcaaatgatacttatatggttttatgtattttgtacagaatcaccataggattattgttttgatgtatctaatattagactgtctagttagcaagataattggaagaattttacaaatttctgtaatattttaattcttatctaattgaattaactccttagcttcaaagtccctaataaaaagtataaaataatcaaaagtatttttaaaaagcttttaatttttaaagtaaataatatacggtttattcactcatacattaagaacttgtgaaaacagaaacatacttcataatgttaagttaaaattgttctattttagttttcaaatatttttaattttcttcaaggagaaatgttaaatgaaattataaccattagtttttataattttgaaaaattttctctattactctgatactttagagagccacaattttcacaaatctttgacattttaagttgtttcttgatattttcttaaattaaaaaccatgtttattcagatttatgcacatctttatttcagataaactattgctacaacttggttaaaacaaaaataaatattttacaatttttaaaatgctggcttatattaaagttggtttacattagaaaaaggctcaaagaacttgtattggaattcttctaccaataaattccatcttctaccaataaattcatgaaaacatttaaaactttataagtaatcaaataaaactaaaataatctaacactgtgtattagtccatttttacactgctaataaggccatacccaagactgggtaatttacaaaggaaagagttttaattgactcacagttcagaatggctggggaggcctcaggatcctcacaatcattgtggaaggggaagcaaacacgtccttcttcacatggcagcagcaaagagaaatgctgagcaaaagggggaaaatctccctataaaactatcagagctgagaactcagtcactatcatgagaacaggagcatggaggtaatcactctaatgattctattactttccaccctgtctctccaatggcacgtggggattatgggaactacaactcaagatgagatctgggtggagacacagagctaacccatattacattgcaacactgttattctcctttctccaattggctacattttaataaatgataatatgccactttcagcaatgaccttggagtgaagtactctggctccccgctggtagaagtccaagcacggctttttgaaaaggttaagatgtgacctatcctttaactcggcaattccactattgtgaattaatcataaagaagtaatgagcatttacaaaaatgtgtatgtgtttgtatatcagtgtgtgtgtgtgtatgtgcacacacacatccacatacaaatatgtgccctcatgtgtgtgtgtggacaagaagtcagaggcaatagattgaggagtaaatggtgacaaaggcattgattgtaaacaagtcttcctaggaaattacttatgaaagatagaagaacaaagtagctggagcaagaggtaagacctgaggaatctttttatgttagggaagatttgaacctgcgtaaacattaatgagaaagaacaaataggctaaaatagatgagaccaaaggagaagtgaaggaggagttcaccaagaagcgagaggtatagaattggcagcacaggtggaggaagcacctattacattgggctgggagggagtgaggtacagattggcacatgtgtgggatggtgagggtggaagggtgagagaaagagaaagagagagagagagagagagagagagatcagaaaggagacatggggagatatggaaaatttaaccagaggcaaagccacaaatttctgctttgggaaatgtatttttagtattaaatgcgtcacgtgcaaaaaaaaaaaacaacaaaaatcagaactcattccatctgtattataaggactgatattttcctaagactgcctaataataataaaaaagattattcacaactataactaggccaagtgtaatataaaaatgtaagataatttcttatgattttgaacaggagttgatgatctttatctgtgaagtgccagctagtaagtatttcggctctgtaagccacacaatatatgtctcaaatactcaatcctgtgattgtggctgtaacacaaaatcagccatggattatacctaaagaaatgggggtgggtgtgtttcaataaaattttatttacaaaaatagatgacgggccagatgtgctaacttctggtctgaaataaaatcagtgaagaacttgacactggtaagctaaatttttgttctctcagggtattttaagctcatgcctgattatcattatatatttctgtggatcaaagagattttcttctatttatagcagaacaagggaaagaacacctattctgcggtctgtggtcctagattttaaggacgacccttttacttgtactggccggttacttaaaacctctgagccctagtttccttcttcgtaaaacaaggcgatgaccctgtatttaatcctcacagatcagaatgagaataaaatgtaaatactataaaaatggtatattattcatacataaggaaatggtcatttgcaaccaaatcagaaaatgttagttcgatctccttatgtgtaagaccttgacattatatatacatatatatgtgtatatatacacatacatatgtaatagttgtaactattaagtgaaataataatatatgcaaagtgcttggctgcagtgcctaatataccttatatgctcagtaaatgccagataatgttcttaatttctaaaggcccattaaaattctccagtgcttgtgacacatagcgcctgaaggggcaaaatcaagttattccaagtcaagcacaatgctggcaatgccagccatgggcagggcagtcacagcaacataccttttaagtaagcctcccagggctgctttgcaaatggcgtaagaaatgggtattgacaattgtcatggagcccagtgactcggaagctgagttttgcgttctgagttgaatatcaggagagagttttcattcttctatgatttggaagttacagccccagactaaaaggaaggcatctgtttgattctatagtaacacaaacataaagagaccagatgagacggcatagctaccccggggcagttttaaattaaactgcaaatgtactcatcagccctttggaggaacatttgcccctatttgttcagtatgtgcagtttgttcaccagaccagggaatgcttagttattatgtgattccaccccattaaagttcttcaagccacccaggagaggcagggtaagcagcaatcggttttccatggatgaagaaggattcaatgagggagaaatgggcagtgcaggagcaattctaactcatttctgagtaaatatatagaaaactttgtgtcaggtgtgattcaacagaaggaaaagcattctctataacagttaacctacatttcgagcaaagagtgggcttttgttccttgtcttttaaacatttttatttttagtttttatctcagtgaaatcagtgggaatctacactgatgccaggttatgcggtgttattcaaacatgaaccttcacctgggacacctgttatctgcaacagagatgatttggcttttggcacttaataagctatttgccctctatagttttaaatcccaggctttcatatagacttgtttttgacatggtgcatttttagatcctgaatatgaagataatacgcactatgcatttggttcaaacatcggatacaagtgtccattgaaagtcaattctccctctcattttctgtatcaaatagataagatttttcacatggatcttttgtcatgttcatattcatcatctcaaaaattcatgacacttattgtttataatatttatttgtaatcattcaattgtagaactttttaaaaatgttaaaaaatagtaacttaacaagactatagtgaccatgaatagaggaaggattcaaacccagatcttctgactccgaataagtttttaaaatagtatttcttattcagaatgatcaactttaacataaataaaaacacttaaaatagaagggtattgatataaagaatgatatgatataaagaacacagaaaatatattgtataagaagtttgcttcagtctgtatttctgtaaatgattatttccaaagctgaagatcaaagtaaacccacatgtgtgtggggtgtgttcacaaattatattaaacttgtgtctcccttctggcaaattggctatagataagaaatgtaaatcacataagatgctacacgttggtttacatgagcctctatatcttcctaagcacacatatccactggcaaccacaagaatgcgatgtaggcacaatactagtcgatttaatgtgattctatgattctcgtttatagaactggaggtttcgcatttcccattcctacctaattcaataactcagattgcttgatttacttttagagcaatgattccctcctgggagcaattttgcttcctagcaaaatttggcaatgcctggagacatttttgtttgtcacaagagggggttgtgtgctactggcatcttgtgggtcaaggccgtggatactaccaaatatcctataatgtacaagacagtcacccacaactaagaaatatcctgcaaaatgtcagtggcaccagaggagatgaatgcaaacatgctaaccacattcctagagactagtacgtgaaccagaatgccatttattaatttgcaatgatagctagaactgtcaaggggaccaagacaatcatatttactgatgaatatatttactccctctggaaaacctatacaaaaagccaaattagaaccagacatttatttgctaaacataaagtcaattctaagaagatagatactcctcatagaacttatcacaatgaaaactgatcatttgtgtgattatatatgtattcctcctctttaagtctaaaaactctattgggatatggaacctatctcaatatgcatcatcttaaccaaggcatctaactgtactgcctgtcatgtagtaggtactaacaaatgtttattgaatccatgaatgaatgaatctttaatgtttcagtttaaaaatacatattaaacgtataacatatacaaagcacaatttgaagcactgggattacaaaatataataagataatccctacttgtgtggaagttcctgaattctgatggactagatggacacttccagttatgtcaggctgctgaagccatagcctgccctgccaacaggcaccatgaaagagctgagcctcagcagccatgttaggtatcatgtgactctgtgccttgaccacatttgaatggactgaggtgaaagagtatgaaagcaggaactggcggcatcctatcatctgagctttagcaagaagatgtggaccctgacaaatcagattcctgtgcttgggtatttaaataaaaatactaaatgactgaattagaagtgtaaagagaagttgcaaagatactgtagtggtttgaatggtggccccccaaaagacatccacccagtacctgtgaatgtgacctaatttgaaaaatgtctttgtactggtaattaagtgaaagatttaaagatgagatcatcctgaattaagtgggtggtcataaatccaatgagcgtgtctttatgcaatagacagaaaggtagaggacacacaggagaggttcatgtgaatgaaggcacagacagacagtgcacatatgtagccacaaaccaacggaggcctggagcaaccagaggctggaagaaggaaggaaggatcctcccctggagacttcagagggagtgtggtcctgccgacaccttgatttttgaacttctggctttcagaactgtcagagaatatgtttctgtttctttcaggccccacactttgttacggagccttaggaaactaatataaatacctagaaagaagaaatatataggagtaaaagtcatgaacggcagcttgcaaccactgatgttacattgaacaaggaactgaataaacaaaaagctttgcagtagggaaataacacagtctggaggaaaatactgagccagtcagtggtaaaagacacatagaattggatcatagagagcagccacgtcacttctctggttaagttctggtgtaaagatacacagattcctgctcttgataatcctgctgctttggaagaagcttttatttcctgcttatccattaagaagtcaggcatgtttggggtttatatttgtttaatcttacaggaaacttcccatcatttcctaaggctgaaacattttgtaaagaattgtaaatagaaaattgcaatataaaacagaaagtagtaaacaagtccagcatgccaatgaactaatggactccaaacaggaacacttggtctggctagaaatttcatgaaaagcttcctggatgaattcattaaattatccctggcatatcttgaaagtggagtgggtacttttcaactgactaataagagatgaaaggacaagaaagaaaaattttcaaaaaagaaaataaaaagaaaactgaaagcagagatgcataaaatcatttgggttatcatcttactatgtaacgggatcgagctatgggcacgtgagggagacacagaagcaaaagatactgaaatgttattgtcagcagattagcatgccctgcctcccacagactttttttggttctatgataagcaacctcttgagacaactgatgtgcctatagttttagatgggctaatacaattccattcctatgagattgcttcaaagttactaactcaagatatatttgagatttttccattttgccccttctgcagatagctgatgtaatttcctgcatttcttcttcccaatcttttgacaaagtaaacatttgaaattctgagtgtcttgaaatatagggaaacaaaggtctctgttctttttttctggaatttgaattaatgccttttatgtaacatcagtgtgaagatgatgaataaagaatactccatagatgagaaatcaaaggagaagaaaagtttaaaaaatatatgtgaaaataatctataaaatagtaatgttctatcagactcccactcactaaaaaaatgaaaaaagtgtggtttctatttagtccctttggttgtaagtaaatgatgtgtctagtctgtgccaaacactgtgctagcttcttagtataaaaaggtaactaaaagcacagcttcactcaaacataaattatgatttagtatgtcttgaaggtatcattttgcctgacagtataagcaaaaagcagaaaatagtgattgattaaccttattttgtagtgatgcaggaatctaataaacccaaattaaggattgaaatgaagataacaaaattgaagtaaccaatatttctggttggagcccacttttattacagcgctaaaaatagtcattgacataagaaaggatagatgaatgccatcttgttattttccagcactgagataggtttagatgagtatgtcggagataggaacattaagaagttggtagccctcgcacatatgatgaataaagatagatcattataaatggcttcaaaactcttttcttcgaaggttcttactgggcttattataaaaggaacaaagattgttagaagatatgctgtcttcactgtctcaaaaacaatactttttgaaaccttctcaagaatatagtgaaatggataaagaacctctctgagaaactcctgttgtcattggattttgaaagttgtcataaaccacctctgtacctaacctaaataatgaatgttgttgtctttgttgtgtttaaaatataagtattgctaccaagtatattacaatattatgctgtatcactaatgtaaaattgtgttttgttaaaacaaagttatgcatttttattgaaaataaatatggaataatataaatgtttagaagctggttagaagaaattattcatctttttcatagaagttcttgttacttcattaaaaaattcatttccttaaacacacacacacacacacacacacacacacacacttccacacactaatcagtttctgtgaacaggtaactttgtagtatcctatttgtatccacatttatatccatgttattagaaattctaataatcttatttaaaggtagaaatttccaagttaaaaattaatattcaagttaatgaaaaaataatttgtttagaatttccacatgaataagacataaaaataataagtataatttataaaagagggaataaaattgcaaagtacagaaaaaatataactgtagtagtcatcaaagaaatgctaatttaaacatggacacaatttttcattcagcaaaattattttgcaaccttttaaaaaataatatgcataataatttttaaaacatgcttaaggaatcaatcaataattataaatatataaataggatattagacatctaaaacaaacttaaaaaaatatataatgtagaaaaaagtactatatactaataagtgaaaggaactgtagaattataaattactatacgtatcatattatgaatatactataattatgttataaatgttaaaagtttaaactagattgaagtaactataccaacatgttcaattagcagtgtttaagttaacggtaggatttttactgtgtgtgcgtgtcgatgtgtgtgtgaatgtttgtgtggaagtcacgtctatcttttttagtaaaagcagttgcttttatcagaacaattcttgtccgaccaaatcaggaaactccaaaattcagctaaaatatgacatatgcaaaaaacaataggtgagaaaatactttccaaaaatactttatgtaagtggaagtgataattgttgtctttgcaatgatcaagaatgagccttaagtgaagtagttgatacgaacttttattttctttcctactttctttttttctatatttcttcctccctgtcaacaggtgtctgcccttttttcacgtctcaaggaattaattcctatctcactcttcttctgtcatcaatacttgccttttgatattaaggccaggtgaattgctgatcactccctgcacttggccgctcctatcttgtcttgcagccacatgaattaggtactagtaatgaaccctcattggagagtctgagcctcagtgattctgaattctgtctccacattatgtatcatttgggcagattttcataagtagggtcatcggctgcccacttcatgcatgctttcacacctccacccctagaatctgatccttacttttctggaatatggttcaggcatagacattttcaaagctcctggggttgtttggaggcccagccagctttactaactcctggcctaatcctaccaatagaatctcattctctttgctacagtgcttgctgcaagcttgggaagctctaagccattcagtgaccagccacagggactggctcaggaaccttctgagccaaagagacaccatgcaagattacctgaggaacttctcagggtgaggatgggagcagaaacttccttttcctttcctgaacatttcagaagtgaccgtcaattcctggaaaccttggccatcttgctccctctgtgaggatgagggttgacctacaagaattacagagagaaggaggcagaattctacatgggccaaggcgggtcacagctctatgtttaattttttagatcatctgaaccaaaatatatgcatttttctggtgttagttcaagtttgatttttctgttaaaacgagtacattccaatgaacacagtttttcttcacacagaggtgtaaaaaattgatatgacataatatgatcctataaccagaggtattttcattttaataaaggttgagtaacttcctactaaataataaaccttttatggtagaattttaagcatcggcaagctgatgaggtaaagagggtactttcctggcatttctgaaatcaattttaactaattgaacacttaacaaaaatatattgaaattgaaggactctgattcgtacctcagtcttagcttttcacttacctcgtgtatgacttcagttaaattacttaatttcagctgggcgcagtggctcacgcctgtaatcctaacactttgggaggctgaggcgggtggatcacaaggtcaggagtttgagaccagcctgatcaacatggtgaaaccctgtctctattaaaaatacaaaaattagccaggtgtggtggcgcattcctgttatcccagcaactcgggagactgaggcaggagagtcacttgcacccgggaggtggaggttgcagtgagccaagatctcaccgttgcactccagcctggcaaccaagtgagattccatctaaaaaaaaaaaaaaattacttaatttctttaggtttccttacttgtaaaagtgtaactatatcataggattctagtgaggataaaatatgaaataatgtgcataaaatttattagtgtgcagtggctggtgaattaataaagatgggacattctattttattataaattgtaccttaccatatgcctatatgctttgttcctcttagtaacatagtagagacctaaaagccctaaaatcaaaaagtaaaggaagaggagaaagaaaaagtttatgttagcattgctgtttgagtctccacagatgtatgttcatcagtgcttgcctattgaccagtcttttatttgatagctggtagacatgtgaacacacgccaattgtgtatagactcatgacaatgctacacctaaatggtctcgcttatccgtgatctttcacctctgaccggacgtttgtatcttttgcccccaacgtggcagctaaaaaggcaaaggagaaatgttttaaagctccaaagcaaagcttggttctctgatgcttgcagacactgtctacatacctagctccatcgactgcatctgtgaccttgtctgtctctcctcctggtatgaaatgattatatgtaggcagagactttccaaacctgccaacactttggataattgttaaaacaggtttaatgtgtaggtgaaatccaaaccaaaagttaggacacagaaaagtgattcagggaggtgcatttatactatttcatttgatattaatgaagttttaaaaactgagattatgtcctagagtaacatatgtttgctctcagaaaaatcactagataagataagggactatttaggagtaagttcctgagacatctggaattttctatcagtgataccgttccctatcagttaaaggtaggctacagttttaaaatggacaaaattctgtgtatgagttttgagtaatagatactgtggctgtattcttaaaacacagaatgctccagtaataggtcagagtatttgaagttttgaaacatcctagtgaagtttgaactacacattgctgaagttaggactgctgtcttctacgtggcacagctgaatttggtagatgattccaatgattaattttaatattaaagttttacattttaaataaaacatgatcctgaaactagaatatcacatcttcaaatatttataaaacgctgtgtcctaagtcctagcaattattgtaagacacataacattgcctgaaattatttagatggacacagtgaatgtttacgtaaccttttaataggaaactcgagttttgtgttctcttcaatacaagctaagacacatttctaactaagttgatatttaaaatacataccacctaagtgaacactttgtaagttcaaatttggtattattgtgaaaacttaaaaacatcaaatatacctttgaaagtttcaagtgaatattgactcctaaatgagtatgaaacagatcagacaattccaaatctctatttaattcaacatttatttatactactaacatcatgggagaaaaatgagtggttctgtttttcgttttgttttgtttttttaacaaggtcttgctctgtggctcaggctggagtgcagttgtgggatcacaggtgagtgtagtctcaacctcccaggctcaaatcatcttcccacctcagcctcccgagtagcagggaccacaggtgtgagccactgtgcctggctggttccagatcattttaaagaaattaagatgtatttatttgttttattggcaattcttagttttatttaggaattgattctcaaagtaaaggtgctagcaggatatggaaaatgaaatatgggaagaaaaacttaaacctatttttaaaatttttatctacaaatagaaataaattaggaaataattcggctttgttcatatttaatatatggatagacactggtgtttccacttccatatgtcacatgatcatattttatgtgtggtgccaaggtttcccagggagaagatgggttgactacacacctattgtatttgtcttctacgtcttctaaaatgaaaggtggctaaagaagattcttaaaaaaagtctcagaaccagtcttacaataaaaatgcaaacaaaatcaacaagaaaatgacagggttgttatttatactcccaatacaaactctttctttgtcacatcatgaggtaaaaatcaatgatgatttacaagagattgatcagagataaaaaaattacctagaaagcaatttgaaatgtgaattcatccactattgttattaaatctgactttgtatgtgtattattgatgattagctagtgttcgttttagaatggaaacaatgtgtagaaatagaagcattatttttcaaaacacacattttgggagaatgtaaactcaaaattgtatcgttagcattgcacaatctaaaatattcggagatgagtaatgtagcgccaaagtatattaaaatgatttcacctggtggctaaaataacaccaaaaacaatttatagacattttataatttatcaatttctttttaaatatattatatattaaattacataaaagctttacaaggttgatgctgttttccccactatataaatgcaataatcaagattttgaaagattacaacttgtccatgggcgtaattaataaatagaacagcataatctgattgctgatcttttgattttaaattctatatttttctagcttccagttttagttgcacacaatctacttagctaaaactgaatttggttaattgtcaaccaagactccaaaacatctttgttatctgatgttcttcatttttactttttaaaaataattgaaatgtcactattatattgacagtaaattcaccagttgttcgatgagattaaccttcttaaaggatgatcaaagcatgcagtgaagggaacctgacggggtttgactgctcagtttatcactgaacagggcacaggtaggctgagtgataacaccactcgtctctgatcagggactcatttgtgccatctggattagcaaagatttcccttccatttctctgctccctgcctcccacaggctatgactatgcttcttgtggtttcatcgcttgctgctgagcggtgttaataactacttgacatttggtttcccaatgatgttcacccaatttttctctaatatacagattctctgcaacacttctcacagtaattccagtgctgtagatatttcttggacatttatacaaaacatttaacttgtttccctgtaatagatagtgtaagttaaggttcacaaagaggaacataatttgcaaattttaaaattgtcctccctttactttaagtaggtaaaaataaagatgcaattgaccctgtcgatattgacttcatagagacatggatattaatatgtaaaacaataatctaaaatgagttttgaaaagaggtataatataaatccttaactaattaaccttgactatcataagtgcattcacatttcacttgcttatagtccatgacatggaaaactactcaatcaatagttattatacagaaacatctgaatcaggcataaagaatttggctaacatcaatcctttatgttagtgaaaactgtaaaaaatttgtataccaccgagaaaacatttaaggttttattaagaaggttttattaagaagtgaactatttttaggtaaactgtgaatccttgggaagaaaatgttatctttctcttttggagtggaggtgtcaaaatttacaaattagggtcaatagtagactagagtttgcttcacagtgaccaagctgaagttttctttatttttccctccctcccctcctcttccctcatctcccttcccctcccctcccctcccctcccctcccctcccttcccctcccctcgcctcctctccgctcctttcccctcccccctcccttcccctcccccctcccctcccctcccctcccctcccttcccctcccctcgcctcctctccgctcccttcccctcccccctcccttcccctcccccctcccttcccctcccccttcccttcccctcccctcccctcccttcccctcccctcccctcccttcccctcccctcccccttttccttccttccttccttccttccttctctgtgtgtgtgtgtgtgtgtgtgtgtgtgtgtgtgtgtgtgtgtgtctctgcctgtctttctgtctttttttcaaggagttgaagtttcccaggcagttggtttataggggggactctctggttcatgggcaatcgaatttcttacaacatagtctatgtgctgaggtggggaaagcatgggagatttggaatcagacagagcaaatgagctcattttaatccctaactaactttgtcacttgggagaattatctgctttatctgagtcttagttccttcctctctaaaatgagaacaatgataacttctctctctctctctttttaacttttgatgtttcattgattgtacataaaacctccataataagagctgagttcagtccaattgttggtgaccgtgcaaagctagacagtggtaaattcatcagggtacatgccacttagtcacactaagtctttgcaatagaaacttctgcagagaccagtctacctttttttgttgtctttagagcaatttaccaaatcattaagaactttgcttttcttaacacttgccatcttcatactcagccagaatgttcttttcaaacaaaaatgtgattttgccactccctgttaaaaacccctgaatgacttcctgtcattcctgagacaacagcccaaatcctgaatacaacttctagggccttccttgtctgacctcatccgacccctacagaaacagagccatgatccataaacgttctactgttcacctccctgactgtggaaagtgattgtccttcagtcttgacttgacccagtgcatttctttaaatctatatgtaataatcagaatataggagctgagcacagtggctcaggcctgtaataccaggactttgtgaggctgaggtggaaggatcacctgaggccaatagtttgagaccagcctggcaacctagggagaccctgcctctacaaaaacaaaacaaaggaacaaacacaaattccccccaaaacaggtgatgagaacgtccctctggagcaaacagaacaacctcaataagaagagcaagtattgctaagagtcacctaaaagcaactgcaaaatgaatgtgaacttaaagtaaaagcaaataaggtagacagggacatttctgttgttaccacctttttctaaagaataaaaatgtttttaaattattctttctgcctttttacaaactaacaaaatttgatcttcctggggagtgggaaggagggatgactcatactgctgaaactcacgtgagatcaatttgtgtgctctaagatcaatttaataatttacactggaaatatctcttcaaagtaggtgtccccactgggacattaaattagcattggaaggcttgcttggcgaatattgaggctgacttaggcaggtgctgagaggcagataagccttctgaacgtaacaggttgcctgtaggggcaacttctccttagtgttttgaagacatattatgatttttctcctccccacaatccttgtttgcaaagatatgagcttattttccaactcattcttacctccatgttgacctcaggaaaaaactgaatgcttcagggagagagctttcaacagacgctcatcttttcttaaggcttgtgacttctaatcacaagcctccaactaagcaaaatatgcttacatacacagatactgcctaaatggggagattatatttagatatatttgagcgcatagagttgatatgacaagattctcaaactaagtaattttcaagtttactagaattttgctgcttaaagttcctgttaatacaagaaaggaccagaagatatctcatttgagccttggaattctaactttgtgttaaaaattattgttatcttacctggagaaagacatctctaaatgctttgtaaatgttacatctgcttaagtagaagtataaaaatagttgtctccaaaaatttaaatttgtattaaattttctcttatgtcttaaaattagaaaatcgattcctatgcacttaaacaagtgataaagaatttgtgttttgggccaggagcagtggcccacacccataattccaggattttgggaggcctaggtggaggattgcttaagaccagcctgggcaacatagggaccccgtctctactaaaaattaaaaaattagccagtcctggtggtgtttgcctgtgttcccagctactctagaggctgaggtgggaggattgcttggacctgggaggccgaggctacagtgagctgtgactgagccactgcactccagcctgggtgacagaatgagatcctgcctcaaaaaaaaaaaaaaaaaaaaatttgtgttttcttggtttgacctttggagtgtacaagaaggcttggaagttatagaaaagttaattgtttttggtgatttcagaatatgtacagcaggtcttcaagtctttgataggttcttagaaactgtgactttaagtgaaaggctgtatagcaggccctcagataatgttgtttgattagacgttgttttattataacgttgatgagaaaaaaaagtgttttattttatgccattttacttaagtcccagtttccaaaaaccttaaggacttactctatttgaaaaatgaaatgaatattattaatattaatatttgttgactgaataaagctgtgtaatagcccaataggctaaatgtttaaaatcaggaaattacaattactactgtattttacagaactgtaggtcacttaattacttttgtaatctgcctataagtgtaaaggcaaagggtagagtaaaattagtaatttttttttttttttttttttttttttttgagacagaatctagctttgttgcccaggctggagtgtagtggtgcactctcggctcactgcaacctctgcctcccaggttcaagcgattctcctgcctcagcctctggagtagctgggattattggtgcgcaccaccaccctggctaatttttgtatttttagtagagatggggttttatcatgttggccaggctcgtctggaactcctgacctcaagtggtctgcccgccttggcttcccaaagtgctgggatgacaggcatgagccaccgcgccctggcagatgaatacatcttatgccatatgcctgaccactccctcagacaaatgagaaccaatgtaatggctgaagaaatggctgcttttttccattgaccttggtgcatagtttctctcctctccttacacaaaaagtaaatttaaatgaacaaagttaagaaggcatattttatgtttataaagctttgattcatggtacaaaatacaagttttcttggagaaacagaagctatttaaaatgtagaatgcagagagttgcattgagccacattccttcttttatctatctcatgggaattaacagacaatgaaaatattgactgtgtttatgcttaattttccctcacccttaatacatttttctgttatgattaattactttcctgtaaaattttgaatgaaattatttaaagagtgctatagataagtgtgtttttactaattttcattattcaccattgtggtataaaatcaacaggtacaagtcaaattaagccctgctgtctgcatgggtactcattattaaatatgagcgatttgggccttcagcaaacgaccatttatattccaaatcgtatttaaaattaatttactcttttatcagaacaaagaaaatttcacacacacaatctcttttactaaaaaataaattttatcataggaaattatctcattttatattccagagcagaaacatacaaaggtgagatgaatctttgtacaatatgtctttctgtcaaacattctaaaacattgtcaatttcattttttctagtattttcaatatttattttgtgtttggcaataaacggagctaatacgaccacttttctcttatgcttggttattattattttaagaaatgaaaacttataaatcatatagcttggaagattgctggcagaataagaaaaaataattttatcttttgtatacatgaaaagtttaaaatatcaaactataataattagtaattacatatgtaacctaggttacatgtatgtatgaggtatggctcacacccatcatcccaggattttgggaggccaaagttggaagattgcttgagaccaggagtccaagaccagcctgaacaatgtagggcaacacatccccaggcctgggtaattttttatggctccatttaaagaagcagcatgacaatgaaccttagatgtcatccagttgagttctcctacttgagcatgaatcccgtcttaaccctcagtttagcaaaccctatcagttatggagagcagataaatctcagcctacttaaacatgaagacagaactcagaaacagttcttcaaggcgctgccccttgttaagctggttctttaagaagcttatccgccaattcacaattctgaagcacagcaaagctgtttctgtattggtgttaattatttattaatgcagtgaaaacactttaaattcctattaaattgtcactaattacttgtgaactaaaacgtaagatgtttagttttttgcttccttctgagaaaatatatttgtatcgccatctttgaagtcagttctactgtaaagagcgtgtatttgggaatcagaaaaaactagatcgaaactgtttgtgttttattgggcaagctacttaaacactttgaacatcatcaggtttttaatttatgatgtaagaagttcagacgaatgaactgagtttatttgcctgcttaaattaaaacatatagaatccctatgtttcccccagtctactcaaatgttttcattgcagtatcaatgccaagaatattgtcactgcatagcaaagcattggagtgaagtagctgatatgtattggatgacttagtttcaaaagctgtttttcctataataccgtaattccttcctcaaacggaggcaacagaaattgcagtagagttcccttgccaactacaaaatgttccatttcattctgcttttctccatttcctagaatcagttacatcaatttgaatctaactagactaagataaaacatgatgaatatgtttgtgaaataaaaacttgacaataaatccttaagatttttctaagaaagaagtttatgaaacttcagagaataggagaatatttcctaataaaaaatagaaagcatgtaagaatatcttctgtcttttaatacaacaaaccaggggcctgcaaactgtatctcatgggccaaattcagctaggtgcttttttgcgtagcccttgagctaaaaatgatttttaaatttataaatgattgaaagaataaaaggataataatatttcatggtgcatgactatatgaagttcacgtctcagtgcctataaactttattggaacacagccatccccatttgtttatgtgttgtctatgttactttgagagaggtgagtggcagccacagaaaccatatgtgtccaataaagcctaaaatatttgctacttagaccttcacagaaacaatttgctgccccatgttcaataaacagctgaaggcagggatggtatcaaatctcaacacctgcttaagtacttgacacatagatctgcacagaatgagtaacagcagaaagaatagatttaaaaaattaaaattattttctcattataaaaaggaccaaatatctataatttttaaaaagccaatagacttacacataagatctgtaatgtaaaactactagaaaaaacacaggtgaatatctatgaggtataagtctgggcaatgattattttggatttgaccccaaaagcataaacaataacagcaaagatagacaaatgagattacatcaaaataaaaatgtcgtgcacataaaaggaaacaatggaatgaagagacagccctatggattgggaaagaatatatttgcaagccacatgtctgataaggggttgatatcccaaatatataagaaactcaaacaaatatatagaaagaatacaaataatttgattagaaaatgggcaaaggagctgagtagacatttttcaaaagaagacacaaaatgaccaaaaggtatatgaaaaaatgctgagcatcattaattatcagagaatgaaaatcaaaaccacagtggataccacctcactcttgttaaaatgactgttgttcccctccctttgtgcatgtgttctcactgttcatcttccacttataagtgagaacatgagatgtttgattccctgttcctgcattagtttgttgaggataatggcttccagctccgtccatgtccctgcaaaggacatgatcttgttccttttgataggtgcagcaaactaccatggcgtatttacctatgtaacaaaactgcccattagcacagaacttagaataaaaattttaaaaaatgagtgttatcaaaaagaaacaagagaacaagtgttggtgagaatgtggagaaaaggaactcttaacacactgttgatgggaatgtaaattagtacaagcgtaatagcaaacaatatggaggttcctcagatattaaaaatagaactgccatatgattgagcaatcccattactgggtatactgggaactgaaatcaacatgttggagagatgtctgcactcccatggttagtgcagcactattcagctttacaaaagaaatgttgtcatttgtgacaacagtgaaattggaaaacgttttgctaagtaatataaattaggaacagaaagtcaaatacgttatactctcacgtatatgtggaatctaaaacagtcaaattgaaagaagcagagagtagaatagtggttatccgagacgctgggagagaggggaatgaggagttaatggtcaagggtacaaagctttaattacacaagagaaatacattattctttgggatatattgtaaagcatggtgaatataggaaataacatattgttatttcaaatgttctcaccacaaaatatggtatttaagatgatgaacatattaattagcttgatttaattattcaatattgtattcacgaactataacaccagtttgtgtcacataaatatatacagctataatttatcaatttacaattaaaaaataaatgaaataaaattggatttaaatgaaacagtgaaaagtcttcatatagatgacaagcacaataacttcattttaaaatttataataccatgaacataggaattcccaggagaaaatttaggtttatgagactatatccattgaaaactctgttggacattttttctgaagttgttcagttttagacctgaaacaattatcttttatcatttaataaaaatggattagaaaatcgctctgtataattaatagtttgacctagtcttctatgatggtttattgattgtttcaactccagagctggctagcaacatgaaactctcatggaaaacctgtttataatgaaggatgcttctgaaacaatatacactattatatcttgattgatagttaacatttagtaactaagtacactagtacatttgacttacaggccatcattttcccttaggagacagtaactttgagtctatcccattcatctcctctagaactttgtcaaacagaggtatatatggcttttgatgctctcctttcatttcacgttgttctttcatgtttgatttgcttaatgctcattgggtttctttttaattcctctaaattatctaatttgaaaaaataactattattaatatactctcaaaaactgtagaaaaaataatttctaaataatttaaaaggtaaaaaatatcaacatggagaccttccataatgtaaaagtggttctttttttaataaagccttttctctactcatttaaaaaagtggagttggaggggctgcctttcaaaatttccacataaaagcaaccaaaaatttgttctaggaggagcactgatggcagtttctgaaaagatttccgtgacaccttagataagagtgaaaaaatcaaccccataaggaatttgtcttcattcactccatactttctggactgggctttcccttctggctagtgattagagctgacagacaattcgacagaatcacaaagtggagaagttctttttaaatacaagttaatggttttgtaaatttagtgccttaagcaaaattgaattaaacattcagtcattcatcttaagcatccttaaaaattgaaagcttcacaatatgcccagaacccagaaattcaagtaacttttacccagagcctacccagccggactgcgcaaaggactgatgagacgaaaggatatttggacgctgccctctaggaaaggtagcctagaagaggagaggacactaacagactaacgactccttcagaggggaggaccacataatcagccaatgtcagctggcccagatccaaacagctttctgcttatgcaaaccttgtgtggtcgttgtgttaactaatgcaaagatatatgattaatgtacttgtcagtgtcctgtgtttagttttctcacaaaacatttcttatataattgagataattactttcacttacaatgccattggtttaagttttaattgataatgatgactttacttttcagtttaccactatagacttttatttttagagtaccattcagagtcagagcctgaaccttagagaattaaactcacttaagattgaagtagtagtcatttcatactttgtgtatttatccatgttttgagctaattccagaatgttgtcagtcatattgggatgcgatatagtaatttggtttttaagtatgattttggaactctaagttactaaaatagtagcttaatttttgttcaccaaaagaatttataactgaaacttccattagagattatatgctttttatttactacttttagccattaaccaattaattataaaatatagagattttatgttttcatctacatatacaaaattaccattaagatgaaagtaattgaattgattgcatattcagttatagaattccaaatttaagtagacacagaaagtcataagtttacatctaaaaattcacgaggtagtcagtcatagtcactacattttagccaactatggaacgtgtactatcatgtactatgagtcagtccctgtactgaagatatcaaaatgaatttgacaatctggtataaaatccaggactattatttgtactgccagcctcagggagagatgaataaaatggatttgtaagttagaggctgcaaaaactgttttttttggtttgttttgctttttgtttgtttgttttcctgcaaaagcatgtattcagggtacaggtggtggttctacccttccagttttctaggctggctgatctttataacttgttgttcataaagatgtatgtaaataagcaccatgtctcaaatttagattgagaattgttctcccagagtattcaaatttttaagagataaaacaattaaaatctaaaatatgtgataatctaaatacatattatacccccattcacccattaaaatattttttcttgctaataaaagaaaaaatcgtttttatggattttcctatccctcaaaaataaggacaataacattttgcctatttttaaaagatattggttagatgaatcttgtagatctagctcaattgttcccattctagaaagcttagaattattatcctgaaagcagaaataattgttaaaaatgaaaacatgaaaactttacataaatgacttcattttcacctcgtaaactttattgcacagcaccgcactccagcctgggcgacagagtgagactccatctcaaaaaaaaaaaaacaaagaaaagaaaaaaagaaaaattttattgatttagaatgcttgacagagcaaagtgaagctgtcctcacagggttagtaagtattctggacagaaacatagttataattaagcattagtcaggctgtattttgacctacttccttacaaccaaagtcacatagcactagatactgaccatttgcatcccattgcttgtatagataggattctgatgtaggatagataggatctctgatgttggaatcacaaggctttttaggaattgcttaagcagatcctaaattccagcagaacagcggaccccagccagtttgaagacactcacagaggaactgagtcacctgagaatagtttctttatctccccattccatgacctcaccctgcactcttcaaccaattcatgatctccacactttgggctacttcagagcctgtgaaaaccctagtcccagactccccaaggtgatgtgtgtgaggttttctcctgtctcctcctttggctgccctgcaatgaaacccctttctttgctgcaaactggtgtctccatgtattgacttgttgagcatcaggcaacagacatatggttacaaaagcagaattttctcttgagtatttagagagctcctaggctgttctgattccaggcagcagacttcaggaggtagcatttctaattttctatcatgatgttaagggaaatatgctgcctgataagtgtttggatattggatattgcatggttgtcccatgtcccagtaaaacacacatttttgctttgtcctggtaattaacaatacaaacaatataaattaatttggccacgtattttagtataaataacacagttacaaataatggtctgtttgtcatcctgtcacctaaatctaaaataccgagatccagatgaaatgaaagagtgcacattttaagttgcataaattatatatatgtatgaagacttaaagttcagattttcagaaaactaaaaagttcttaatcatttttagaaagtagatcagcaaagtactgagttattttgtataaagattaaagcaggtattatctgtgtgtgtgtgtgtgtgtgtttctgtgtgtgtgtttgtgttgttctaatattaatagaaacaatagaaacaatatttctttaatattacttttcaagaagatagtaaaagccaagaagtaaaagtgttttaattcttgagctgttaattcaatttttttcttgaatgattgaatattatttccatcatttgttcattgtaacatttcccaatacttatagatgatatatagaaaaacaatttaaattgaaaatcattaatttcccagtgcatttcctaatatatctatattcagatctgtatgttttcttgttccataaagaaaaagataccttcgtttttttcaaattaatatcaagagcattaagttttattgaactaataatcttcagtgttgtctatggatttaaattccattttattgccattttgggagactaaagacagaaagagaaaaggaagaaatatagatgggtgatcaaagtaggtaaaaccataaagatgtgtgaaataaaagtgaaatagaagaaagagatagccaaatgaggaaaacaaatcacagaagagaataaaggcatgtaaagcatacaaaactagaaaaagtgcaggaaagagaaagaaataggtagataatatagaaaaagttttgaaagtttcagtaaatatgataaggattccatgtaggtaataactatcagagagttataaatttatatgtacttctttgaaatgtatagtaattggcattaatagcttttaggttattccaatgtttatttgtagtgctatactcataagcataccttctataaataagcacattctttatgctagaaagataatgaaagctctatctggtaacttgttttccatgttgaatgctacaaacacactctctaaacgtgttaatgtgaatgtgtgtacccttgcatacacagacacacacgtaaataaaaaaaactttattatatgaactgctagcacaaatatgtgtattttgtttgaagaaatactctggtaagtttcttgacacttactataaaacgtgagatgctgtgagcatgaaagaaagtggtcattaacatacccaaaggaagagatgatccttctatgctataaggaaaggaaactattggttttcttacagaaaacaggaggtagaatcaaagaataaggcaagggaggacaagagaaaaagacagtctgggactttgtgaagagccactatttgcaagttgaatgtggttttttgctttgttttgttttgtttttcttgctattattgagttattgttctgtgtttcttcacgagtcttcaaaaagtctatactgttcacagtgcttggagtgacagggttttcctgcagaaggctacacattcaagcataaaaaaagaatgtacagcagcttagctcaagaaacagaagatattactagtaaatacatcacccccacagctttaataactgcccaccccctgcaaaaccttaggaaaagtttggaaaggatttgacatctataatctgtaaagttgcagtaacagcagagtctcaaggcaattttgcctaaatttctgagaagctgagggtcatgaggttgcaaagccttctgtccagatgtggggctatcaggggatttggagtttagctttgtttggttgttccctatctcatcaatttacttttcacaaaatctgcctctgaacgttcgatccactgtgaatatgtttgaagcatgtttttgaatgcatgttcaacactggagaaagtagattacagttctgctcttggacagctctggtccagcactgcaggtggtgaatgtaagagtgatagtgatgtgatctcttagagaagaatgatgtgttaattaatttgaggaatggaagagcatgcccttgacagtcactgtgacttgagtttgcgtgctagcacctccatttgagctcagatttatttaccttgtaattcctgtagaatatagatgatatgctgtacttcaaaatttcattgtgaatattaaaagaaataatacggccaggtgtggtggatcacgcctgttatcccagcactttgggacacccaggtgggatcacttgaagtcaggagctcgagaccagcctggccaagatggtgaaaccccatctctactaaaaatacaaaattagccaggtgtggtggcatgtgcctgtaatcccagctacttgggagggtgagccaggagaattgcttgaacccaggaggtggaggttgcagtgagccgagatcatgccactgcactccagcctgggcaacacgagcaaaactccatctaaaaaaataaaaataaaataagatagaaataatacacacagtgttcttagcaaattccttggtgcacaattatatggtagttattattatcaaaattataaagcagaaaaaagtctcaaagccaatgattatttatttatttattttagagttggagtcacggagtgcagtgtcacgatcatagctcacagcagcctagaacccctgggctcaagtaatcctcccatttcagcctctgaatacctaggactaaaggcatgggccaccatgcagctaattttttagttattttattttattttattttattttgtagatacagggtctcactttgttgtccaggatggtcaccaacactggcctcaagcagtcctcctgcctcagttttccaaaatgcagggataacaagcatgagccactgcaccaggcctgggaacttacagcctagtatattccgcaattatggagggggtacgacttatgtgaaaccttcaggaatgcatacccttttagagagaaataagtcttaagttagagatgagaaaaagcatgggaggctaccttctgaatattgaaggtaggtgtaagattataatggtagagaataagttcagatatgaagaataggcctaggttatggcagaccttgaacttcagagaaattttagctaaatatgaaggttagaaagagccattatacatttcagaccatggaagtaatataagctggtcgtttagaaaatttcatcaattgcgttatgcaagagtaactgaagttcaaagagatggtttttgagaaggtgactggaaggatttgcagttatcaagaaatgaggtgaagaggacttggagtaattttggctgagaaaaataaacctttacatacagctctaagtctataagaacaaagaatatataacaatccacatgtagagtataaaataataagaatgctatcagtaaaacaatagtgaaaaagaagcatcacatttagtccataaattaaatcgtgtccttaacttagtataaaaagatctaaggattatggtataaatattgcacactttttatgtggtggacatgaaagcaatttctgtgagtttaaccaatggaaaattggtactcttggataaatgattggccctatacttgaaccattaaaagagagaacattaaactaagtagacataattttgagagttccactacattaaaattgaagaacagcttactaaaaacagccagacttaagggtaccatattgtataaaaatgttatattttccatattataaatggtttggctgatagatacttaagaggaaaaatatagccagagtcttttaggttggccatatagtttcaagttttcaagttatcgaaaatcaacccatttatttatttaaaactcatactcacctgcttggagacataatttggaaatttataagttgtatatacaacttcataaaatctgaagaaataaatcaaaataggcattattgaaaagcagcaacataaatgtatgtcattgggattctacaatgggtttgctgtaattatatcgtacattgatgttaactctcagtttcctgacagctaaaacaaagagaaaaaaatattataggtattaaaatgtttatacaaatcatttaaatctgcagagacatgcatgcttgtatttaagtgctgagggtggactgttcaacataacagatgattagctttcacctgaattttacaaacatgctatttaaggcaacaaatacattaattctatatagaagttaagagaccatacttcagtggagggatttccttaagagaccagcagacccaacattccaggtcaacagaatcaaagcaaatgctgtttataataatacaatttagggatagttgtggtaaattttaatgacatttccaaaaccaattggagcctatgcaccttaatttgaaacattgtgaaatggactcaggattaatttgagaatagaagaaaagaagactattccataatttcttttacagaaaattatttatcttctttccatttaagaagacatacatggtgaccgggcacagtgactcacgcctgtaatcccagcactttggaaggctgagacgggcagatcacaaggtcaggagatcgagaccatcatggctaacatggtgaaaccccatctctactaaaaatacaaaaaaaattagccaagtgtgacggcagatacctgcagtcccagctgctagggagggtgaggcaggagaatggtgtgaacccgggaggcggagcttgtagtgagcccaaattgtgccactgcactccagcctgggtgacagagtgagactctgtctcaacaataacaacaacaacaacaacaacaacaaaaagatatacatggtatcatttcaagaccactgcctacctataatgtccaaagttgcatgaatgatctccaaataaatgcacatgtacattcacagtggtgcaaggaattttctggaaggagcaaacataaacacgggagggacagcctgtgtgctgggtgtggaagtaaccaaagaaattgttgtggtattgtgaaggaggttgatggtaaacctcttgtcaactaatgaaagaggaatgattatggctaagttgtaagttccacctccctcctcatttccaaaaatttcctgttcaagctacctcgtaggacttggaaaaggtacaactcttcttccactctttctgaaaaattaatgggagtctgttttccacaaggatagaagaatattatcctgagtagtttgtcagtggttgtagtggataatttttagtgtacagcaaaaatataatgacatagtgataggacaaatattttctgcaaagcaaaaagaaagtaaggcatcatatacaatttgttgctacatgacaaaatgaaagatttaaaaatttaaaatttatgcaccccttttcagtcccatataatagaagtttgttttgttattatttacagatgatttaaaaatatttagacaatcgcaacttctgtatccatcaatttggtaaggtaatattaaatgacacaacttgtcaactaagttagtcaaaatggtttatatatgtgatctttcattcacttagtcaaaaatcttaagtgcctattgtatggcagaaatattaacagctgacacatatagtatctattctatttcagagatagtattaaatgcctgatgtatattaacacatttaatcctgacaaagattcttcaagatttatggaaggaaaaaactgaagcaaaaaagctaagtaatttgcacaatattgcgtatctaaaacgtgttggagttgagatatgaaaagacagttcaacgttagaggccgaactcttaaacagcacggcatatggcctcttgagtcccgagtgataagctcagaataaaatgtgggtcaaaccatacaattccagccataaaagtgatgaatgtagagctcttaccatcaccatcatcatcttattattactatgttattactttgctcttacagacatgtgctatacttctgttactagaaattcatctctggagacatatttgttattcaaacaggtgaaaaagttatccccataaaaatatgacctttgtaataaatgtattattcaacaagagttaccagttttctgtagtatagcagacacagcttttggctggtagaaacaggtaagtacatgattaaatctaaagtaataggtactaaagtaatggtattgagattcagagatgggagaaactaggtacacctttgtgtgcatgtgtgtgtgtgtgtgtgtgtgtgtgtgtgtgtgtgcgcatgcatacatgaacacgtgtcatgggagacatgggtagggattcacaaagggattgagaaaatcaaaagtgatggggaaacaagagaaaagaacactataggaaatgacacttaggcatagcttttaaatctgttttcaaacatgaacaaaaattgagagaatgacataataaacactcatgtacctctcatttgcctcaattataagcaatttgccagtctcaaatcatgtaccctcctcagtttttaaaccttattttaaagtaaatacaaaacagaagttttttttttaattattgtagtaagcatacaacatgaaatctacccttttaaaattttaagttcacaatacattgatgctagctataggtagaatgttgtacagcagttctgttgaacttattcctgttgcataactgaactttatactggagcaggtttttcagtttccatgtagttgagcagttttgagtgagtttcttaatcctgagttctagtttgattgcactgtggtctgagagacagtttgttataatttctgttcttttacatttgcttaggagtgctttacttccaactatgtggtcaattttggaataagtgtgttgtggtgctgagaagaatgtataatcttgatttggggtgaagagttctgtaaatgtctattaggtctgcttggtgcagagctgagttcaattcctggatatcctttttaactttctgtctcgttgatctgtctaatgttgacagtggggtgttaaagtctcccattattattgtgtgagagtctaagtctctttgtaggtctctaaggacttcctttatgaatctgggtgctcctatattgggtgcatatatatttaggatagttagctcttcttgttgaattgatccctttaccattatgtaatggtcttctttgtctctttcgatctttgttggtttaaagtctgttttatcagagactaggattgcaaaccctgctttttttttttttttccatttgcttggtagatcttcctctgtcccttttttttgagcctatgtgtgtctctgcatgtgagatgggtctcctgaatacaacacactgatgggtcttgactctttatccagttttccagtctgcatcttttaattggagcacttaggcaatttacagttaaggttaatattgttatgtgtgaatttgatcctgtcattgtgatgttagctggctcttttgctcgttagttgatgcaatttcttcctagcattgatggtctttacaatttggcatgtcattgcagtggctggtaccggttgttcctttccatgtttagtgcttccttcaggagctcttgtaaggcaggcctggtggtgacaaaatctctcagtgtttgtttgtctgtaaaggattttatttctccttcactcatgaagcttagttcggctggatatgaaattctgggttggaaactcttttctttaagaatgttgaatattggcccccactctctgctggcttgtagaatttctgtcaagagatctgctgttagtctcatgggcttccctttgtgggtaacctgacctttctctctggctgcccttaacatttttttccttcatttcaactttggtgaatctgacaattatgtgtcttggagttgctcttctcgaggagtatctttgtggaattctctgtatttcctaaatttgaatgttggcctgccttgctattttggggaagttcccctggataatatcctgcagtgttttccaacttggttccattctccccctcactttcaggtacaccaatcagatgtagatttggtcttttcacatacttccatatttcttggaggctttgttcatttctttttactctttttttctctaaacttctcttctcacttcatttcattcatttgatcttcaatcacagacaccttttcttccacttgatcaaataggctactgaagcttgtccatgcatcacgtcgttctcatgccatggtttttagctccatcaggtcatttaaggacttctctacactgtttattctaattagccatttgtctaatcctttttcaaggtttttagcttctttgcgatgggttcgtacatccttctttagctcagagaagtttgttgttgccagtcgtctgaagccttcttctctcaactcgtcaaagtctttctccgtccagttttgttccgttgctggcgaggaactgcatacctttggaggagaagaggcgctctgatttttagaattttcagcttttctgctctggtttctccccatctttgtggttttatctacctttggtctttgatgatggtgacatacagatggggttttggtgtggatgtcctttctgtttcttagctttccttctaacattcaggaccctcagctgcaggtctgttggagtttcctggaggtccactccataccctatttgcctgggtatcaccagtggagtctgcagaacggcaaatattgctgcctgatccttcctctggaagctttgtctcagaggggcaccctacgaggtccataacaaaatggaggcagaaataaagatgttctttgaagccaatgagaacaaagacacaacataccagaatctctgggacacatttaaagcagcgtgtagggggaaatttatagcactaaatgcccacaagagaaagcaggaaagatctaaaattgacatcctaacatcacaattaaaagaactagagaagcaagagcaaacacattcaaaagctagcagaaggcaagaaataactaagatcagagcagaactgaaggagatagagacacaaaatacccttcaaaaaatcaatgaatccaggagctggttttttgaaaaaataaacaaaattgatagaccgctagcaagacaaataaaggagaaaagagagaagaatcaaatagacgcaataaaaaattataaaggcgatatcaccaccaatcccacagaaatacaaactaccatcagagaatactataaacacctctatgcaaataacctagaaaatctaaaagaaatggataaattcctgcacacatacaccctcccaggactaaaccaggaaggagttgaatcactgaatagaccaataacaggttctgaaattgaggcaataattaatagcctaccaaccaaaaacgtccaggaccagatggactcagagctgaattctaccagagggacaaagaggagctggtaccattccttctgaaactattccaatcaatagaaaaagagggaatcctctctaattcattttttgaggccaacatcagcctgataacaaagcctggcagaaacacaacaaaaaaagagaattttagaccaatatccctgatgaacattgatgcaaaaatcctcaataaaatactggcaaactcaatccagcagcacatcaaaaagcttatccaccacgatcaagttggcttcatccctaggatgcaaggctggttcaacatacacaaatcaataaacgtaatccatcatataaatagaaccaaagacaagttggcttcatccctgggattcaaggctggttcaacatacacaaatcaataaatgtaatccagcatataaacagaaccaaagacaaaaaccacatgattatctcagtagatgctgaaaggcctttgacaaaatgcaacatcccttcatgctaaaagctctcaataaactaggtcttgatgtacatatctcaaaataataagagctatttatgacaaacccacagccaatatcatactgaatgggcaaaaactggaagcattccctttgaaaacgggcacaaggcagggatgccctctctcaccactcctattcaacatagtgttggaagttctggccagggcaatcaggcaagagaaagaaataaagggtattcatttaggaaaagaggaagtcaaattgtccctgtttgcagatgacatgattgtatatttagaaaaccccatcgtctcagcccaaaatctccttaagctgataagcaacttcagcagtctcaggatacaaaatcaatgtgcaaaaatcacaagtattcttacacaccaataacagacaaacagagagccaaatcatgagtgaactcccattcacaattgcttcaaaaagaataaaatacctaggaatgcaacttagaagggatgtgaaggacatcttcaaagagaactacaaaccactgctcaatgaaataaaagaggacgcaaacaaatggaagaacattccatgctcatggataggaagaatcaatattgtgaaaattgccatactgcccaaggtaatttatagattcaatgccatccccatcaagctaccagtgactttcttcacagaacttgaaaaaactactttaaagttcatatggaaccaaaaaagagtcagcattgccaagacaatcctaagccaaaagaacaaagctggaggcatcacactacctgacttcaaactatactacaaggctacagtaaccaaaacagcatggtactggtaccaaaacagagatacagaccaatggaacagaatagagccctcagaaatactaccacacatctacaaccatctgatctttgacaaacctgacaataacatgaaatgagtaaaggattccctatttaataaatggtgctgggaaaactcgctagccatatgtagaaagctgaaactggatcccttccttacaccttatacagaaattaattcaagatggattaaagacttaaatgttagacctaaaaccataaaaaccctagaaaacccaggcaataccattcaggccataggcatgggcaaggacttcatgactaaaacaccaaaagaaatgacaacaaaagtcaacattgacaaatgggatctaattaaactaaagagcttctgcacagcaaaagaaactaccatcagagtgaacaggcaacctacagaatgagagaaaatttttacaatctacccatctgacaaagggctaatatccagaatctacaaagaacttaacaaatttacaagaaaaaaatcaaacaaccccatcaaaaagtgggcaaaggatatgaacagacacttctcaaaagaagacatttatgcagccaacagacacatgaaaaaatgctcatcatcactggccatcagagaaatgcaaatcaaaaacacaatgagataccatctcacaccagttagaatggcaatcattaaaaagtcaggaaacaacaggtgctggagaggatgtggagaaatagaaatgcttttacaccattggtgggattgtaaactagttcaaccattgtggaagacagtgtggcgattcctcagggatctagaactagaaataccatttgacccagccatcccattactgcgcatatacccaaaagattataaatcatgctgctatgaagacacatgcacatgtatgtttattgcggcactattcacaatagcaaagacttggaaccaacccaaacgtccatcaatgatagactggattaagaaaatgtggcacatatacaccatggaatactattcagctgtaaaaaatgatgagttcatgtcctcttagggacatggatgaagctggaaaccagcattctgagcaaactattgcaaggacagaaaaccaaacaccacatgttctcactgataggtggtaattgaacaataaaaacacttggacacacggcggggaacatcacataccggggcctgttgtagggtggggagacgggggagggatagcattaggagatatacctaatgtaaatgacaagttagtgggtgcatcacaccaacatggcacatgtgtacatatgtaacaaacctgcatgttgtgcacatgtaccacagaacctaaattataataataataataaagaaagaaagaaactttgtacttactgaacagcaaacaacagactatcttttaaacccattttactctgcttagttttaaatattgagtgcaggtgggagaactagatatgagaagaaccacctttttattattggaaatgaccaagggcattgttttggttaaagtaattttaggatgtttccattgaccattgatatcttacatacatttcctgttttaacttcggagcgagtcattttgaaggattttgctggactttcagaacgtgtgatttgttttaacggtgctctcgggctgccatatgtgtttatgtaggctgtgtcctgaagaaggggtctctgttagggggtatgagtacgctgaaaatgaagcactctccaagcagcacagaggtgcattttctcatctgcagtaaggcatcttagcggccagtggtcctgacagcagcaagtagatctcaaagccatttcacgggccttctcatattcacactaattctaaatcagacttctgttaagaaaggagaaataggtggggcgcggtggctcatgcatgtaatcccagcattttgggaggctgaggcaggtggatcacctaaggtcaggagttcgagaccagcctggacaacatggtgaaaccctgtctttactgaaaatacaaaaattaatcgggcgtgttggcgggcgactgtaatcccagctactcggaggatgaggcaggagactcgcttgaaccctggaggcggaggttgcagtgagccaagatcagcccattgcactccagcctgggtgacccagtgagactctgtcaaagaaaacaaaaaaaagaaagaagaaaggaaaggaaggaaggaaggaaggaaggaaagaaagaaggaaggaagggaaagaggaaatagaatttaacaatttgaacaaaaaaagggggaatagaatttaacaatttgaactaaatacaaataaagtcctttgctgctatcaaaatgcaattgtgacatagagttagtgcaaatatgttattgtgtaatgactgtgcaaattgcttttctgtatgtttgtcttatataatattgacagtactacatagtgtgtcaaaaaactaaacttggtatttttaatgctaaaatgagtaaacactaatcagaatgccagcaggtacaatatctttgaatgaaaataacacattcaaactgctgtttctgttctctttggtacacggtctgcatagttagtatgataaatgcgaatagaattttcatgctgacatttaattaaaatgaaattacctatcattgttacccactacacagaagctattatttatgttgatattattctaatattgtattaagctgatattgaatttgtatcagtgttttttatgaactgaattatttctgattcctcagttgtttttaaaagccaaggagtagatactattgcattgtgcgtggatagagcatattttcctcttatttgaaaagttagaggtggaaatcatgtagttcagtgtaactataattgtactattttcctgtttttttttcttttgtcttctttggctattttgatgccttttaatgcatccccctgttgatgtacagtttaatatctgatataacactaagattaattttttaattgttaatatatctttgactagtctttccctatattattaccattgtgattacttttacttactacgatcaaagtagcaacttgtagtcagatagcagtgatattcacggtctatcaatttatccattcatccatttatccatcctacttttcttcccttcccccatccatccattatgtactgtggatttgcactgaagtcaattggaattaagtattataaaactctattttactaatagccatataaaacccttaagaggcaattcagacattcacaatacttggaattttaacagttacctctattgactattacaatatagcataatctgtaaaatcactctggcaaaaatgtgtatctatgttttagttctaaggaagcaccactcagtacaatgaaacaggaagaaatgctagtgatttacattgttcttgaggaagttaaaaaaaatcaattcattgtgattctgaagctttctctttaggtcagatattgttatattgataacaaagcaatgacaccacacagtttttgtgctccaataaatgtgatttcaaattttacaaataaacatttttcccttttaaaaagtatatacgtctatctgtttagttggacaaatgaagacaaagcaaatttctgtgacccaaatccaagtctgagtactcaagtttgggtttgtacagtttagtttaacttaaaaacaagtgacttgttcatttctacgccacaaatacctaaaacaacaaatattacacatcatttttggttgagaggaatgactaaatcattgtttctagtgattgcttcttatgacaaatcaacattgtttattaaaaatatgagattttatagaggtcaggcatggtggctcagacctgtaattctagcccttgggaagcggaggctggagaatccctcgaagcctggagtttgagaccagcctgggcaacaaagcaagaccttgtctttacaaaaaaaaaaaaaaaaaaaaagaaagaaagacagaaattaggaaagaaagcaaagaaagaaaggaaagagaaagaaaagaagaaaagaaagaaataaagaaagaaaaagattggctgatctgagtgcagtggtgtttacaactaattcatcacaaccagttacagagatttatttgtcccatctctacacctaactccttcatttaactagaaaaatatatatatatattagattttataagaaggaaagtagaacatacaaataatattaagtacttatctattacttgagatataccaactagggaagacagaggaaggacaatcaatataaatcatatttaaacaactactctagtaaattgatcaaagtctggttagtattatctgctttaagtttttctaaggattttcaatgagagaagaccgtatcatttccccacaacccaacctatccagcgtttttctggaagaggctattagcaacacataagctgccagcaatgtaaaatccccttatttgctgccttaacatttgggataaaaagtgttgacaccattattttttaacctcgatctcattgaggaacttcctgaattttctaacatcaatttactgctaaagatctatataataaggagattttgaatgttaggaacctgtgattatgggtgagagttagttgatgagagggtgagagttagttgatgagaggattcgaagctctaacatctcggaataactggtaacacatatctttgcaacatagcttcatttcactgttaggctttggtgtgttggcgattttttatgtgtgtaattaacatattttattgacaatatttatgtatatctgtaattacatatatctgtacaatgtgacatttaatctatgtaggcattatagaaagtttcagtcaagtgaattaacatgcccttcacctcaccaatttatcacttttctgtggtgagaacattaaaactttttaaaaacaaatctgaaatatacattattattatctgtggtcaacatacaatgcattacatcactaaagttcattccttcagtctaactaattctttgtacctctgattaacatcttctcttccctccactcctagtttctggtatccacatttctattccttgtttctgaaatagaccactttagagtccatatataagtgagatcataccgtatttgtctttctgtgtttagcttatttcatttagcatattgttctacagtttcatccatgttattgcaaatgataaaatttccttcttttttaagggtatatagtattccatagtgtatatatactgcattttctgtatgcattcatctgttcctggatacttatattgctttcatatcttggctattgtgaataatctaaaagaaatctgggaatgccgatatctccttgacatacagatttcactacctttggaatatatccagaagtgggattgctgaatcacatagtaattctatttttagatttacgagttactcccatgctattttccaaaataggtgtactaatatactttcccatcaacaatgtacaagggttaccttttctccacatccttgccaatacttgttggcatcagtcgttttgataatagccattctaatgggcatgtggtgatatcccactgtggctttaatttgcatttctctgatgattggagatgtggagcagtttttcatatatctattggccattcatatctcttcttttgagaaatgtctgttcagattctttgcacattttataattgggttgttttcttgtcatgagttaaattcctcatatgacgtggatataaacccctcatcaggtgtatagtttgcgaatattttctttaaatctggtttctctcttcatcgagttgtttcctttgctatgcagaagctgtttagtttgaggcaattccgtttgtctatttttgcttttgctgcctgtgcctttggagttccatctaaaaaataattacccagaccaaagctgtggagatcttcccctgttttcttatagtatctttgtagttttaggtcttatatttaagtcctttatcaattttaaattgatatttgggcctggcacggtggctcacagctgtaatcccagcattgtgggaggcagaggcgggcagatcacctgaggtcaggactttgagaccagcctggccaacatgctgaaactccgtctctactaagaacacaaaaattagccaggtgtggtagcacatacctgtagtcccagttactcaggaggctgaggcaggggaatctcttgaacccgtgaagcggaggttgcagtgaactaagatggcaccactgcactccggtctgtatgaaagaaagagactccatctcaaaaaattatatatgtatatatatataaattgatatttgtatttctagtgatatggggtctgatttcgttcttctgaatatgaatattcggttttcccatcagcatttgttgaataaaatccgtcatttcctattatgtattcttgtcacctttgaaagaaatcaattgatcataaatacttgagcttattttctgggctttctaacctgttccattcgtcagtgttcctccttaatcagcccagtcagagattctaagtgcctctaagttttgtgtttgtccagcctgctgtctttgttcttagtggccccaatacatgggagagtatcaagttgtgctatcgccttgagagacatttgatagaagccagtccctaggaatgtggctggagaggtcggggtgttagatgcgtgttccagttctttctgtctctcttttcagagaagctgagagccagagtttctttctcatccattctgccttactccaaggaatgaagctgagatagatgcctgtacccttgatcatactgctcactttgaacctggggagatacttgttgaatgtttgcaagtttaaaagtcaccttttgttccctgtggtctaggagattcaggagcgtggagttctgtcaactcccagagccaggtgatttaggagccagtcccaagcaaagactgtaaaagttgaagtatttgatgcatgtagaaactgcctccagggagggtcttcagatctatatttactgctgggtcaagctggggaagaaggtgcagagagtgcccacagtcctgcttgagcattcagaagacgccctccctcatagcaggggagacttctggtctggagtgcccactttcctttaagacatgaagaggtctctctgcttccttccaataagagattgcggagtttatctctagagcaagctgagggagaaggcacaggagtgctgtccctcccagtcttgctgggagaagacttcaactcttcacagagagactgcagggctgggattagcactggagaaagccagggaaggccctcgtaggtgctgtgcttcctgtttaggctcaagttggctttttctttattgctttgtaggctcccagagactgacctgttaaaggccaaaaccacagggaactgctgtgaagccaaaccctctccaggggaagggtggaagctggacagatctaggggctaccgctgctgagagtgccctcagaggcagttcaaattcttctttgtttttgtgcttgagggaaatctcccaatgtgctgtctctgacattctgcaagtggggtgatctaagagcccctcccccttgcagtgatggtaaaagttgggcattataggtgtggtgcaagcctgttacccctcaggaagaagctgggagttgaggtttctttccaaatgtaaggcactgtgctcagggtggggttatgcctgagtgtatctccactttttctactcatttgggtgtattttcatagttgtcaggtgtgtaggagtctttgagctggattctggctttctctgggacagaactgatccactcatggctatttacttggtgtgtctgtgggaggagggagcatcaagagtctcctctctgccaccttgctgacttcctgtgttgaatatttttgacttgtgtttatttacattttgtttatacatttgtattttttcaattagtgatactacaattcatgaattctgctttatgctatcaattatgagtagccttaggttaattgctatatttaatttcctgttacagctatagcttcttgtggcttagaattgccttagaatgtaataattctagcaacaaaagaaaatagattgaaatgggccagacagacattcatctgttctctcttttcataaaaaggaaaactaaaaagtgcttataatttgagatattgctgcccatttgaaattataaaaagtctctaaattaagacataactgcttatttctttcagttttttgaaacaaatcaagtaaactatacacagaagatacatgatcatttctctcatgatttaattttagacaatgccttttaatctttttatttcattttaagttaaaaaggccatttgccttctgtattaattattttgtttatcaagtcatctgtaattgtttgtagataatgataatgtattttgaaagcagctttttttttgttcctatataccccaaatgttacttcataacatttttattttatttttctttcttgatcttcaagtgaaagagataaagcctggtgcttccctttcttgtcagttttagaaattaaaggagagagaaaagaggctgaacaacagatgcaaggtcagattaaatgtctcattagagccttttatgcaaatgctgaaccctgcagtcttgaaccgacagacatttcactgtttgggatcctgatgagtcaagtagagacaaggtaagagtcatattggttatttagataaaagacttaaaccaaaacatagggctgagaattaggaccccgggggtgataaaaaattacatattaaaaaaaattatgtcataagtccacccgtggtgggagataactttcatgaagctgtgtttggtcatgagaagttgctagactccatggtggaacatacttaacatacgtccataagatacgtttacgcaaaggataagcaggatgttttctatttataactgtgtcctgtatgacagaagttttaaatgtgttcaggttttttaattttttttttttttaataaaaactactactccaatcactgtgtggcttctccaagcacacctactctttccaagagctatcactctatcagaggggcactgctgctcttctcacccacctacgggaggtcgtcagaggagggacactgaatccagaagcataggggccttgttcaatggggattcattcattcattcattcaatacatatttacaaatcactcaaactaaacactttcaattgaaaattgtgttatgtaccgcataccatgatggataataccacaacttggtacgtcatagagttatgaagattgataaacatttgtattttcttagtccctttttatttattcatatacattttaatatctgattatcatgtttgaatttcctttgattataatgttctttataaatgcaatacattaaaattagaagttagcagttgactttataagaatcattacaaaatttataattattcaaacaacacaagcaaataggtaatcatctatactaagctctaatataagttccaagacaggctaaatccagtatactgccttgtatttttttgtcccatctttctgagaatctttgtataatttgacaataatgtcaagtggaaagagaaataaatccctctttttcttttcctgcatgttgtacctgagagtgttttttccttttctgacactccttttgtatagttctttcagcagtagcaatttattctaataaataggcactcatcacatgatctggaaactactgatttcgtctcagtctgccacaaatacaattaagctgttctgtttccatggttagccatcctgttttctaaaataggaggtttctaaacctctccattttctacaagttaaaaactggagctattcttttttaattggttcttctgtattggatcaaagcatgctatgcaattactgatgctgtcatattggcagaaagaatacgcagaagttcaagctaacattacacatgtcatctttccttgaagaagtacacacagttaactcaatcaaagcaatgtaaagcttgttttttgaggcattgtttccaataaaaagatgaaattggccgggcatggcggctcacgcctgtaatcctagcactttgggaggcgaaggagggcggatcacgaggtcaggagatcgagacaatcctggctaacacggtgaaacctcatctctactaaaaatacaaaaaattagccaggtgtggtggcacgcacttgtagtcccagctactgtggaggctgaggcaggagaatcgcttgaacccggtaggtggatgttgcagtgagccaagatcgcaccactgcactccagcttgagcaacagagcaagactccatctcaaaaaaaaaaaaaagatgaaattaacatttttatcatactattattggatgtaaactagtgattataatgattatgaaatatatagcaaaatggatcagagttttacacatttagttctgttttgattgtttttcatatttaaaataataaagtgttgagaattctactaaagctataaaataaaaagctttcatcttaaaacaatcttatcattgtagatgatctgattttcataccgataaacatgccatgttacttcattgtcaatatattatacaggcaaaataagacaaaatatacgtcacttaaaaatttaaaaaatgtcttataggcttctgaaaatgattaggcacatactatcactttttcctgtgaaataaaaagagatagtctttaatatttagaatgattgttcaacttaatgccttctctccctatttacaaacactctgtgtttggaaaacacacaccttaagcaaaatgcaggtatatgtaaaagaaacagatcttgtttcaagagagaagatacgaagaaagcatttaaaacagtgaatgtcttcaccattactcctcaaatggagtaatggtgaagccggtgtggagggagtgtataaaatttttgtaacacagttggcaatacctgaatacttaaatatgtaaattgttaggataccttagaattcagtatagaaatgttatatataataatcttacataataaagtaatgcaatacataatatgtatgtataatcttaactcttatgaatgctttgtaaatataaccgattgacagccaaaacagtccttggagacagatatctcttctattatcccattttgcagttgagaaaactgaggcacaaaaggtagagtaatacgcccactgtcacagatccaacatgtcttaggggtgggatttgagctccggcaacctggctctagaggtgttggtctcgaatgcctcaatctttttgttctccatgataagatgtggcatcacagaaccctccttatcctctaggtcagataacttttactgtgcttaggattttaatgtctttctaagacttaaatgataatttttccttctcagcatgcatttaattttgaatacatcatgctattgtactctaagtcatgtatatagatccacagcaataaaaatactttaaaaaacttgtcataattacacattgataaagggatttcactgtcatatcatcattttcagaggctatcatattagtataatttaaaatatagtagtaaaagcttgaatctatgtgtctggataagactttctcaacaagagagattttagtagaccggggtacaaattggacaaacaaatgttagaaaataatgctgaagacaaaatatactcaactcacttcttatagcaaatgtgttaaaagtgtacagctcataaatttgaactcacattgttttgatttcttatactctttgaagccaggcttgacgtatggatgcatatttaagatgtgatcggcttcaaacatgaattgattattctgtttgatgttcattaacattaaataatttgagtggggcactgaatctgattgtgtttattttagtgtgtgttagtgaaaacagatttctgtgtagctgatctaatgtaggtggacagcaagtgtctgggctgtgtctgcattcccatcgttcgggcatggctgtgttgtcagctgctgactaatatgtcccttgagtgacaccacagttctgctacatgaagggaggaaaaggcgagttcattcttttgattttacacagtaaacatgccaatttcctcttaatgtatttcataggtaagcaaaataatgtaactgtcgccccccccaccccagttttagtacaaaaataattaaaactccattaatggttttatttggaaacagacatctgaattaatattttttctccattactgcagcaaaaaaagactctgagtataaattgtttaaaatgttgatgaggattatatcattaaaaaattgacatcatgttttgaaattgtcatttttgtaataataaatcatcatatatttaattttgaatttttttctagctataacctgaactttgcagatattatacctctgtagtttgaggttttgtttctgttttgtgtggtgtcctagagtggctgttgtagttatactccaaaaaagatgttaatgcaaaaatataatgcttataggataaggggtataaatagttcactttctttcccttcaggaacaagttacgtaaattcattattatactgaggcagaatgttatacataagaagaagaaaatggcaccagactaaatagtacctcttgaaatgtttcatttattttcatgttacggttacaatgtgaattgatcttccttcccttcttcccctaggaatctgactctatgatcagaactaatttttttcttccctttaagcatactgagggtttggagatagctcctatggttttcaaagtggtggattgatttaattgaccaaaacatagcagggagtagtcatctgattatacaagtataaaataatacagaaagggattttttatttccactgatacaattcaatcaagtttctttgagttgctgagttcaaacattaaagttaaaaaaattcttgatttataaagaaaataaaagttattttctaaatggtttgatttccaaggaacagggaaaaaatgaaatattgttaagattttctgaacaatgaaataaatattgagtattaaataaaagatataatatcttttaaagaacagatatcagttaagggctattaaaattacttttgttctagagttcttatcagaagctctaccaagtttttcagtgtttacaaacagactaacagaccaatttcataataattttcaaaaaaatattgtaaagtaaagtataaggtaacatgatgtgatttttaaggtcaataatatttttaccttaaagatgatgatgcgcttattaggaaaacagtggggtaaaatagggtagccgaaatgaaaccaaagattaaaaaacaaaataaaacaaaccccaagttatcaagtacttaaatggggcattatttcctttgagtatttttattgtcatagaatcagatataaattatgaaagaattaaaacgagaagtttttaaatttgttttactttttagggatggaaagattagtgccattctatctggttttcactttaaaatcgagaacatccctctgagcctttggagtggagagaactcactgtgtggatctcagatccctcttgtttaatttgcctgagtgcttcactgagcttgcaccttcctccacactgagaacaaaagcaggctactgaattaccttttgaagcactacctcctaacagaccccttggattgagaatatggcaaataacagtggctgcagccgccttaaaaacagaagagaatggagtgtggaatgcagacttaacctcagtgtgattttgctccagaataaagcgacatagctctaagtcaggacataccatggggcaagggagtgatggacaaagctaggaaaagagatgttctacacacacacaaagaggttcttctgagtgtggatgcttaaaatctcaagaaggaaaatgtttttcatctgtggtcacaaaggcacaagtaatctagtttaaaatatctagaatggaaagcagcctctgtatgggattagtggctccattatttctttttttcacagcaattttacatgagatctgaaattctttcctttgtaatctaaaccttttcagtttttagatatatcatttaaatatgaaaaaaaattcagggaaaagtaattttattgttttagtacaggtcatggaccttggagtcttcataatggccaggccacatggaaataaattcatagggaaaaccatgctgtaaggacaaagggatctggagtgggttgaggggaaggaaggtattaggtaaccttcactttttattctgcctaaggccaatactagtggtttcaatctagtgacatgcatgttagggcacattttagagcatgtcactgatagctgcctgaaacagccagtatttgcactgtcagataaaagatattgcctgcttcacagtaaagaattcccctttccaggttttaacaggacaagggacggctaactcagatgtatgagctttggtagtacctcagctggtccattaaaaatgtgcatgatgtttagaggcattttatgatttttacaagcataatgttttcactggaaacgtagcagttatctaaatgttcagggaaggttttcttccaggtattgttgcttgtatcctagaatgatttcattcataggtgcagtctcagaatgaaacatacaaatttaaatttgggaaatctattggatcctcttttatttttagggactttttttctcctgtgaataagaggagactgttgtgttcattctcttttttttttttttttttgctggctatgacggtaactgacactcagtaggtcttccctcaatatttgttgagtgaatagatgaaagtacagtggggaaaggaagcagggcataaacacaaaaacggataataatagaggtggtgttaatgacattgaggccaaaatagaaaatttgattctagtggatggtttatcgcatgatacatataatgggttatgaactggaaatcagagggtgtgaatttgcttttattatagtaggagagaggagctgatgagcattagaaaataatgaaaatgagtcattttcttacaaaatattatctttcagataatatagcatcatcagagtctttggatttagagccaaaagagccttatatgccatctaattaaatgtcttatttctaatgtgtatggggagattttctggaaaattacctatatgtgacctaaagtttttggaaatgccgtgtaagaagtttttcttttcatgggaactggaagggataaaaatctgattgcttttcttcagcaaagcataccagcgtccccattaggcaagtgattatgcagtgttgaaaggtattttcttgagaatgttatttttttccttttcattaattatgctttgtctaaaggttctttgtcaaagctctggctagtacttgaaattgtaattgatagggaataaaagaaagtaaaatctttgatctctctctcggtgttatgcaatatctttattcttgagatcaaaagactccgagtataatgctgaccaaacagaggctacagtactgattttgacagagaccaaggacaacagctatgaaagttaacggctatataggcatgaaatgacaaaatcaaaacaaacaaaactgtgagagtgcctctatgctaaacatccttgcatccttacataacataaacagacacattaaaataataaattcataaaataggtacacaatattatccataatatggatctatgataggtccataaataatattgttcaggagaagaggtattgctcttctaggagaaactataggacaagcatatttccaggaaggcatcaaaataaacatttattacagaaaatcctgaaggaatagcttgtacctattcttacagttgaaggcttctagggaaaactggtatctagaacacatagagttccttatttcataataaatgcatcatttattaacattgctccattccctgtatcacttgaccctaagagcaattatgaagttaataaagtttatctttgatgtaatggacatccctttctattctccccagattctttttgtctcaagtatttatttctcgtcatatggcctaaagacatttctcttataaggactgtgcattggtaaactaactctcagaagacttaaagtgacatcatgctttgccactctgggaattatttgaatttaaaatacccttaaaaagataacaaggcttgggcatgatggtgggtgcctgtaatcccaggtacttgggaggctgaggtgggagatttgcttgaacccaggagggggaggttgcagtgagctgagatggaacgattacacttcagcctggatgacagagagactctgtctcaaaagcaaagcaaaacaaaacaaaacaaaagaaaaagagtaaggcttaacctaagaggtctgaaacctaagtagggagagttatcatggggtattgtaaccaatggtgctctcattcagttaagaccatgaaggtacataaatagacacatcatcggtggtagttttgctgtgtgattcctagccactctcacaaaagcttcccctgtgtctcctgtttaaattgaaattagcagtatctggtacttttctctagacgtagtagaaatacttagatggcagaggatttctacttcctttcagtattacattgattcctgacatctttcagtcagggttctttgattaaagttgaatcatctatcattttattctatttttaattgctttgctttttctaataaatatatattcccctcttttaatgatatcatgaactttgaaaatgtttcttcctttgtccttccaaaaattaacttatttcagtagggaaggctacaaaaatattggaagagtaattatatatatatatatgtgctgatataaaactattttatcaaaaccaaaacgaaaacgaacttgaaaatcaattatataggaatatgcaattttagtataagaaaataggaagtcaaaaatcatggatcattacttaataaaacaaaatagtaaaaatgacaatatagtttttttggatacagattcccactctgttgcacaggctggattgcagtggcacagcaatggctcactgcatcctctacgttctgtaatcaagcgatcctcccgcctgagcctcctgagtagctgcaaccacaggtgcacactactaccaattttttgttttttttctttagagaggaagcctcactctgttgcccaggctggtcttgaactcctaggctcaagaaatcctcctgcctcaacctcccaaagtgctgggattacagacaatatacttctaatttatatttgcaaaacatcaaatgtaagacaattagaaagtagaaaaatcttgatgagttttaaaaaattataacataagtttcttaaaatgtacaatatatgtacaatattaagaagtagtaaaaaagtcatatttctgactttgtgaatcaaagccaatgtattcaacttgcattcttccccattttgcatataggtatttctccggccaatgaaaacctacaatattcagatctacatggcttactgaatattgtctttccttttgtcctgttttacatatgtttttatagccccttgtataatttctatttagaatctcagttgaaaaactgaaggggaaaaagacagacagatggacacgcccccctatacacacacacacatgcacacacacacagggagagagagagagattaaatatgaatatggaggtgaacataggcaggactggcacatgacaggtatttaatgcatcatttccttacttccatatttctttccatcttccttcattcctactttccctgcttaagacattttcaataaaaaaaaactttaacatttaaattgggtcaacaagacacatcatgtgcacatagtttgggtaataataattaacttcacggttaaatatgacatgatatgatgacatcagacatgtttattaagatgttgtctagctatccatctggccacaaactgagcttactttaccagtcttcaaaagaattgctcaggctagaaaaatgttaatttccctgtttatgttgcttaaaccctgaaaagttatattctaactaacagtattaagatctaagttaatgattctatctacaattataggtaattattaagtgcttaatgcaatgctcagacatggtagatctaacaaatattctcactgttcaatttctcaaaatcctattttactaaagatcacacacacgcatacacatacacatgcactctcacacacacatgcctgataatgcagaggaaaaaacatatttgtagtgatgccagtggaaggactgttgcattaatttttcactcatttatatacacgattcagaaaatcaataaactattcttgtttgttttctcaaagtcttcaaaacgaattaatgcatttcaaagttttggagctagccttgcatatctcttttcctgaatgctcctgaatctttattccatgtcagagctttgatgaatcagttacatgacagtgaatgccatttgctgatagcaaatgaattcaaatagccctcaatccatgtaggacaagactgtcgtatacttcttggtactattccttgtgttataaaattgaggtaattgagcatttaatatcccatttacaattttgtgtatgttgatgacacaccacagccgcaggaagctattaaagtgcatagacaggtacatacaccaatcaaacttttgccacagaaaagcatctccgtggatgaaaagagtggcgactttttattttaaattatgacagctctgggcagcactactggcagccaactcacagaactaatttactatcacctttgtgatagaaacagcttgatctaaaatttgttaactatgtaaccagttggttaacatgctgtaaattggatgttcagttcttatggaaggaaattcacatttcatttattatatttttatgtcaattatgtcgaagaaaatatttctcttcctatgcaaataagtaatctgatatatttttattcccccagagaaaagtataaaaatggaactattgccctgtagaatattcaagaccatggtgccacttattttatactgcaagtagtaaaatctgacatggtaataatatagatagtaaaatctcactgggatggagggatcaagggagaaatttcactaattccctaaacttaattattcaagggtatttgaagaaaaaaaagaagatatttaatatttataggactccatggttccatttcattcagtggagcttacacaaaattttgatttaagagcaatctgaactagtcaaatagtagactgtactgtaaacaatatgctatataactgtttgtatacaatgaagtggtaatattggttaaacattaaatttacaagaaaattagcatcaggcagatggcagaaggcaactcttaagtaataaacacaattgtatatctggttgcacagaaagaatgaaactttgataaacacaaattctcttctgttcattctgcaaaatttcacaactgtaatagaatgtaactcctgaaatactacaaatgaaattaaaatttgaaaagccacatccatgacttacagttcatctagcaagcagtccatacattgtttcattgcttatcaacaaatgagaaagctataaatgcccaatgcattttgaaggtcaatttttatggtggcataattttaaactagctcatcctcagtggcttttgtaataaaaagggataaattaatggccccttaactaaagtgaacttttgatacggaaacaaaaagaatattaagcatgtcctattttaagtagaaggattaagagctttattccatgaaataaattgggcaggacctaagattcaagactttgaattggtttctaggacattaacataaggagaacaagagaatttgacattgctagaaagaggcacaaaaggatgtagtatctgttagaggaaagattttcacactagctgacagtaactacaggacgtatggtggactgaagtgtttttctcagtttaatctgtgtcttcaaaaggcggcctcaacccttgggccacagaccggtactggtccatggcctgttagggacgtggctgctcagccggaggtgagcagcaggcaagtgagcactgctgcctgagctcagcctcttgtcagatcaacgatggcatttagattctcataggagcacgaaccctatggtgaactgcacctgcgagggatctaggttgcgcactccttatgagaatctaactaattaatgcctgatgatctgaggtgaaacagtttcatcctaaaacatcccctcctgtccatggaaaaattgtcttctatgaaactggtccccggtgccaaaaagtttggggaccactgttctatcaaaatatcttctcctttgtttttccagctttattgaggtatgatcaataaagaaacaacgtatatatttaaggtataaaagtgatatattgataaatttgtacattgtgaaaagactacgacaagttaattaacacatccataattcacttagcgacctgtgtgtgtgtgtgtgtgtgtgtgtgtgtatggtgagaacacttggaatgcattctcacagcaaatttgaagtatacaatatatcattaactagtcactacattgtatataggtcctcagaacttgttcatcttataaatgaaagtttgtactctttgaccagtatctcctcttctctccagcccccagctcctcctaatcaccattctcctctctgttaccaagaatttaacttttgctttagactccacatctacgtgagatcacgcaatatttgtctttctgtgcctggcttatttcactcagcacaatgtttgtcagattgatccatgttgtcacaagtggtatgatttccttttttactaccgaataatattctaaagtttctataccacattttctttaccaatttatctgctgaaggacacgtaggttgtttatgtatttggctatcatgaataaatgttacagtgaacatgagagtgcaaatagctcttcaagacactgattttatttcttttgaccatatacccagaagtaggattgctagaccatatgggagttttatttttcatttttaagaaacttccataatgactttactaatttccattcccaccagcaggacaccagggttcccttttctctacatcgtggtcaacagccatcctaacaggtgtgaggttctatcacattgtcatttggatttgcgtttccctgatgattaataacaagacatattctccttgccaaaattacaaccagaccatttttaaaataactttaacctatcatgttccaaacaaaaaataccatcctctccataagtggctatggaaattatttcttcttttctgttctttccctttttatttgtgctcacatctgacatatatggaggctagctgcccatttgtatctttgcccagtattacttcaagcgtgagtgttcatcttactcattttttaaaaatatattttgggagtccagcagaagtcttgcatatagcatgtattaaataaatacttgctggctttaatttggtttaatgttgccaagtgtctttgccaatatattgccagtcactttcacttgaaaacctcagcttcgatttttattatgtcagtttctctactctcttgttatgtaccaaattctaatgatattttaagtcagttctattctcaccaaccagccttttcttttaacacatcggtattactgcaacactttctagctgacctccttgcccaacctaaggttcttctaacttgaaggcattctatgtacaactgtggtactgaatagccacattacttccctgctcaagcattatataacgagtcttcactacctactgcatcaaagtgtaaaattatttcccaaattttatacccccataatttagttttttatttttctccaactttatttttcattatgctgaaatattttcttcgttaaaaatctcatttattgattcaacaagtactttctttttttttttttttttttttttttttgagacagagtttcactcttgttgcccaggctggagtgcaatggcacaatcttggctcactgcaacctccgcctcccgggttcaagcaattctcctgcctcagcctcccaagtagctgggactacaggcatgcaccaccatgcccagctaattttgtatttttagtagagacagggtttctccatgttgatcaggctggtctcgaactcccgacctcaggtgatccacccacctcggcctcccaaagtgctgggattacaggcgtgagccactgcgcccggctcgacaagtactttcttatcaccagtaatatgacaagcactgttttagattctggaagcatcacaaagttcctgtatcttttttgaaggtggtgatatgggtggctataaaacaaacctgttctcacagagcacacaatcaattgtatgtataaaaattactaaaatatgtcaagtggtgataagtgctatgaagaaaagtaaagtatgatacaaggacagagaataatggggacatggagggttttattttatttaaagtgctcaagaaaagcctttctcatacttcaatgaagggagaaacaaaccatacatatatctggttattaaacttttcatcgaaagagaacagaaagaccaaaaaccctgaggctggtttatacttggctgttggaggaaaagcaagtggcgattttatggtggcttggattaggatagtagcgacaaaaatggggggaaatgttaaaggcagctacaatttttaaatttgcctattggcagtatgtgctagtaatatattacatgtccgggccagtacagggacctcatcctttcttttcaattagcccaattataattgtgatgaggatttctggagaaaagtaatactatgctttaatgattctaaggtctaaaatataaccaaattgcctgtaagatataagcaatgatcagaaggtgttgttcaataaccaactatcatggccgggcgcggtggctcacgcctgtaatcccagcactttgggaggccgagtcgggcggatcacgaggtcaggagatcgagaccatcctggctaacacggtgaaaccccgtctctactaaaaatacaaaaaattagccgggcgtggtagcgagcgcctgtagtcccagctactcgggaggctgaggcaggagaatggcgtgaacccgggaagcggagcttgcagtgagccgagatcgcgccactgcactccagcctgggcgacagagcgagactccgtctcaaaaaaaaaaaaaataaaaataaccaactatcatataaattattcggccctttattgagtatattccatttatccagcagtgtgatttctggctgtctcagttattcagtatataggctcagatcagagtaagcagaagaggactttgaacatcagagagcagtcagaactggagaatctacttgcagatgagggatttattacaggtctagtgactcattgctgtttggtatctcatcctccaggggtcctccaggtggtctgggtttgttgtgggatggtgggttctgggcatcatactttctccatggctgctgattggcctcagagccagtgttccaaggaaactcaaaaaaaaactgcagggtctctgccgacctcacctctgacattccacatcactcctgctgcattctgttggggaagcatgtttcataaatagaaattggactctacttgtcaatggaaggagtaacaaagaatgtgcagtcatctctaactggtcacacagataatgcagaatttaatgttaatgcagtagaatataattattacatacgtgaaggtgcttttaatgtttctgagaacaagttaaagcatgttcaaagaactgtttcactaaaggaagcaggctatcacatatttttaaaagattttcattgaaaaatttaaaagtaatctttaaattctcagttatttattaccacgtacatatatatgtatgtgtatttatgtaaaaatatatatacatatgtgtgcatgtctatgtagatacacacacaaatatatatggtatatttatgcaaagatcccactgataaatacatgtatctattttatttattaaatttattatataactaaatttaaatttctaaaaatgtagtaaaatttttattattgaaggcccaaagtaactcaaactgttaacttttataatcgaatgcatatttttatcttgggattgtttaattttaaaactatttattcaaaaataaacatataaaaataatagtaaaactcacacattcatactgtttgtttctgctgtaaaacaaaattggaaacaacaggaaattgattgcctaaaggaaaacttaaattaaatataatagcttaactattatgtgagcagtaataaagttgaaaatgcatgccctttgttgtaggactttgagccaactgttattttcattgaataatttctgatttatttatctagtcaatccgaaatcagcagttatccttagaaatatgtcacatattctattatctccaagcatgaattatcagatcttagagaaatttccaaatagaaagctatatctatgaaagtcaaagtgaatcgttaatacaggcttccattgtctataaacaatgatcacttgagaattaactgttcattaacatgcttcatttttgaagccaacagtaaatattatttaacatgaaaataatttttcagttttacttttttggatcctagattcttgtctgatttttacttgtgaaacatatccctaacccagaaagtatcattctatgcatgtccaaatttactatgaggggtaaatgaattaaagtgctcccagagggattagaacctgagggcaatttcttcttctttttcttcttctatttttttttttttttttttttttgacaggtctcactctgtaacccagattggaatgcagtggtgcgatctcggcttactgcaatctccgcctcccaggctcaagtgattctcctgcctcagcctctcgagtaggtaggattataggcgtgtgccactactgcctggctaatttttatatttttagtagagatggggtttcaccatgttggccagcctggtcttgaactcctgacctcaaataatccacccgcctcggcctcccaaagtgttgggattactagcatgagccacgatgcccggcccccatttcttcttgtagaagaatagattacatcaacctgaaactgctttaagagtcaaaatgatgcagctattcttgcaatgttgggtgatcagggtgatgattgtaatttacttttgaattttcaaatgttttgttgacctaaactataagtaaagatgcactgctcagagaagccagtgaatatcagagtagaaacacaagcctgttatctcatgcccggaaaaaaagtaagaattaagtatgttaacttcttagactataacacacatttaatttctcactgagtattagttttccatggtgcatgtttttatgtaaggagaggaaaaatccattttcaaatccaagtcacatttctctcttagtaatcatattattaatatcagttaaggagtattttatttaaggcaacaagtgttaaaaaataaattcctaaaggtgtcatggctcaaacatgatagaaaattatttcttgctcatttacaaaactggtactttcggttggtaactcttttcaaagcaataattcaaagactctagctcatttccccaatgtctatggaatcctcatcattggcttctaggatcaccatgcttatctgtactagactgaagaaatatggagaattgtgcctggaaagttttcaagggtcagtcctggaataaatgcatttatttaaaactcagtcacatgaccatacctatctgccaaggttccagaaaatataatcctgatccatgactaggaagaagataaaataagtttgatgaatagttacccagtctccaccatagcagaagaagcccattctatttgagattcagagatcggcaaaataaactcagtaggcaagaggcatagagaaggttggaagtcctatagcagcttaattaaagcgccctggccgggcgcggtggctcacgcctgtaatcccagcactttgggaggctgaggaaagcagattaggaggtcaggagatcgagaccatcctggctaacacggtgaaaccccgtctctactaaaaataccaaaaatgagctgggcgtggtggcaggcgcctgtagtcccagctactcgggaggctgaggcaggagaatggcgtgaacccggcaggtggaggttgcagtgagccaagatcgtgccactgcactccagcctgggcgacagagcaagactccgtctcaaaaaaaaaaaaaaaaagcatccaatcagtctccaacactcaagaattatttgtgagattcttatagaactaaaatctgtcactagctagttctcctgtcttctttcatggcacctgagagtttgaaaaataaaaggttatgaattgtatgcatgccattttttttttctgtattgtatgcatgaaaccatcaaagatggaattctttctacctgtagatatccatttctcctccaagagatctcaggtcccatgacaatgtcaccacttctgctcctcctctgcaagtgtaatgaagagggtatttcagtggaagcaatgtattactttccctctcttggattatgacttgaaagaataacattcacacatttgtgaacctgttcatgccccacttcagttatcagtattattcctcattgcttccctgcacatgtaggttaatatcctcactcaccttttctattcttgcaccccttccatgcaggcaaaatgttatacagttttcaaccctcattgatcacatcccaaactccctccactttgatcacttgtagtagagtcagtgtctctcacccataagactttgagttctcattaaactgtgaagtcagagcttattacatttttatctttgcatccctagtacctagcaaaatgtctgccagtggccaaatgctcagaaattactggtaaatgatttgaagatttccactgactatgctggtctaccctgttctgaacttcacatcaaaacctatatgttgagagttttcattatgacaaaaatatactgtggtcaacatcttgaatgtagtgttagttatgatgatatataccgtttctaaaatttctccatatgcacattgaaaatgaatacattttattacatgtaaattcttaagagatgtaattttaaaaaagagctactgaaatgctaaacaagacagaaaaatgtccctcgagattcttgctattgagctgacgaccaaattcaggcacttgcagagtagttgaccttctcttaagaaggagccctcctctgtgccctcactataagaaggagcctcccaacattagattttctcttgaagagccctttggactgttgttctgtctgagagctactggagaatctctttgatagctttgcttttgacggttttctctggagaaaggtctaatagaagcaaacagttaaaacccttttccatccttcacgttttttaaaaaaagtctcccttttaatatgattttctaactctgtagcttctttgtgtcattttgttcctacaagtgttcatatatacttttaggtcacatgcatttccacacacaatctgaatgtttcctacaccatagagaaggtgttagagactggatacttatacaatgttatttaggggtcggggaagagggagactctattccttaaaacaaggaacacaaaattaaaaatataaaacatgatataaaagtaaatattggccagggcgcggtgacccactcttgtaatcccagcactttgggaggctgaggtgggcagatcacctaaggctgggagtttgagaccagcctgaccaacatggagaaaccctgtctctactaaaaatacaaaattagccaggtgtggtggcacatgcctgtaatcccagctactcgggaggatgaggcaggagaattccttgaacctgggaggcggaggttgtggtgagccgagatcacaccattgcactccagcctgggcaacacgagtgaaactccgtctaaaaaaaaaaaaaaaagtaaaaacaatgtaaatatttatctatagtgagacaagtaatcaaaaccaaaatatggaggcttggagatataggtccctttcttccaggagctctcggtaatttactagaaatgcttccacagaaatacttttgatttaaagatagatttttctttcacccagaactttctctaagttctaccaaattatctcaatttgattgtaatttaaatggaaaacataaaactacaaacttttagaatataacatcgaggcacatttttgagccccagggcctgctgacatgttcttagacatgataccgaaagcataatccataaaggaaaaaaaaaacagaattaattggactttatcaaaactaaaaatatttcatctacgaaagtaaaaaatgtatgtatgcacaacaatctgtacatgattgttcacagcatttctatttttaacggccctaaactggaaaaactaaaatactcctcaataagtgaatagttaaacaggttgtggtacatctatatcatgaaatactgctcagcaaaaacaaaagaagacctaacaacaagaagaacaacaaaagtgttgttagatgcaccaacttggatggatctcaagggcagtatgctgagtgaaaaaagccaatctcataaggtcacaaccttcttgaaataaagacaatacagggattggaaacagattagtggtggtcatgggttaaccatggctgtagtgcagggagaggatgggtctgagatggaacagttttgcatttagattgtggtagtgcctataccttacacatgtgattaactgatataaactatatacatatattgtatcaatgtcaatttcctggtttaaatagtgtgctatagttacgttaaatgaattcatggcagaaacttgatgaaaagtacccaggacccccctgtctttgcaccttctagtgaattcataattatttcaaaataaaaaatttaaagcttaaatgttagcacttacacaagtggattactttattacttctgggatatgtacaaatttgggtcctcttagtgtctccatgattttacatgaggttgttctaacataaaaaaaaaaaaacaaactacgtaaagagtgtttttaaaagtgagaagaaactactgctagtttgagaaagggctagatcctaatcagtaaatagaaaatcagttaacattcaaatcatgtttaattattttatcttggaatgcacacgattactgttttattttttactttttagagacagcgtctagctctgtcacccaggctggagcacagtggcatgaacacagctcactgcaacctcctcatcccaggctcatgtgatactccaacctcagcctcctgagtggctgggaccactggaatatggcacatacctggcttttttgtttgtttgttttaatttttcttgtagagatgaggtctcattatgttgcccaggctggtctcaaactcctgggttcaagcggttctcctgctttccagcctcccaaagtgctgggattacaggtgttagccaccacacccagcctatgattatgattttattcattagtctatgtaccaatatttaaaagaagaatttgtatcttgcatgtgtgcacaattataccttacacataaatgagtttgaaatggtaaaacggcaaacctctagactatgacagccaaagacaggtatttgatccttgaaaatagaaaataatataggcaatgacttttgcaaaatagtgagatatttccaggtaacatttattctgaaggatttgctttcctatcactgcaaagatggccttttcaaccctctcaccatcatctcatttgctgagatgagagagaggagagaggggacaaatggatatacagatatatgggggctgggggagacagagagaaactgtgttttctggggcaggcataggtaacatttacagatacctgtccaaagtacacacatatatttctatagtcctagcattgcacacgtattactctaaaatgctggcattttctgtcaatctgcttggtagcaaatgctgaggaacaaaccaatcactggatctaggagccaagaactaacagagactctgtgctttatgtgtgagcatttaactactgtagatggagacctgcacgtatttaaattgaatatcagtcctgtgtaaagagtgattattctgatgcttctccgcatcagatataaagttatatggagtccaaagaccatcaatagaggattactcgtagcccatctaattttggaaaacaatagaggagttttctggtgtgaggtgaacagcctgctgttttctttgcctggaatgcattttcctcctcttccatgcttcacctccactccccttacctagttaatacccactcatggctcaacatttgctcagctggtgtttacctacgaagccttcttattccttagatgaaaataattaccccatgttccactgcccagtcagagttaaacagaacttctttttttttatttttctttttaagaatatagagtctttaatgtggtcagaattaagttgctatcagtttaaaatagcctgttacaagtgtattttatataagcctcatagtaaccacaagcaaaatctatattagatacagaaaagattttttttttaaaaaaggtttcaggccaggcactatggctcatgcctgtaatcccagcactttgggaggccgaggtgggtggatcacctgaggtcaggagttcaagaccagcgtggccaacatggtgaaaccccttctctaataaaaaaatacaaaaattagctgggcgtggtggcaggtgcctgtaatcccagctacttgggaggctgaggcaggagaatcccttgaacctgggaggtctctctgtctctctcagtcattatctctctcttcttcaaacctgtaacaaaactccataaggaaagaaatttcattgtgtttgtatttgtctccatagaatctagtataatgctatgtgtacatatgtacacatatgcgtgtacatacgtgcatgcacacacagacttacatacacagggcttgcagaggaataaattctgcttttaaattttctatttaaaaagatacttcaaaattcccttcaaatttgatgaaaccaaaagtttgatttacccagacgttgaggttttttcttttatgggatatacaattattccatagtgacatgtcctaagataattttcatattcatagaggaggctgaaggtaggattttgtgaatctttgataatagttacatgaatgttgaatgtttgtatattgaacttgcatattctattaataccatctctggaaatagggtcatttggttataccaagttttttgtatttacatatttcaagaatatctatttaaatatatgtaactagagctactggcagataacttaggtctatatggaaattatgaataaacaaaagtagatgtgaatgaagccaagaaactcctagtgatataacatgaagtctttactcaagctttgtttagaaccagtaacaggggattttactcttttcgtgcaatggtccatttgtcagtctaattaaaaaaaaccacaaaacaccctcctcggagtaatataatgttattaaatacataaaatgaaatacagcggggcatggtggctcacgcctctaatgccagcactttgggaggccgaggcgggcggatcacgaggtcaggagatcgaaaccatccggctaacacggtgaaaccccgtctctactagaaatacaaaaaattagccgggcatggtggtgggtgcctgtaatcccagctactcagcaggctgaggcaggagaatggcgtgaacccgggaggctgagcttgcagtgagcggagatcgcgccactgcactccagcctgggcgatagagcgagactccgcctcaaaaaaaaaaaaaaaaaaaaaaagaaatacatagggttgaagagagaaatgaatcatattgaaagccaattttaactcaggagacaggataacctttttttgtttgttgttgttgttgttttttttttttttttggttaagcaacttggctttcctaacatctaatacttttcaaagttttccatatttgtttgctgcttatgaaaaccaaattaatgatgttttttcctgaataatctcatcatgaccttattcttataatgaaagaaaacagaatgctaaagctagggttgacagataaaatatagaacatagcttaattgaattttagataaataatttaaaaatagtataaatatgtaccaagtattgcatgggtcttactaaaaatttgttatttatctcaaattcaaatttaaatggacatcctgtatttttatttgctaagcaggcaacccttcaaaaactggtctaggttaacaaatgttagcgataaaattgccatgatcatgccctaaggaagtagaatcggatctactaagattcttattttatctccgcctgaaaaatattagccttatgggttggtttcagacctgtccctacatcatattttatgagttttgggaaggcaaatatttgctaaaataagatttaattctgtgctttaatgttttattgatgataatataaaagtggtaataaaagaatacttcacttttgcaaaaggcaattgaatatactgactgatatttttccagaaagtctgtctagttgtagtgacaagaagaaaatatctcttcctagattatctattgaaattccttttatcagcaagaaagtgtaattcactacgttttctcttttgcctttctgcaaaaggctaagagttcagataataatgtttaatagttattaaagtgaacttatctatccttttgtttaaacattttgatacatgtccgcattttattttcattttaactatcttattttattcatgttatttttctaagcctgatcaatttttacagaatgatcagattataagtcctaaatgaaatgccactaatttgaatcatattcagaatgtaatttgttaagtaacaaattttacaagaaatgtgatagatcatgcaaaaattataggtcttaaatcctacatatctcgaatcaaattattttaatactaattttcattgcaattaaaggattcagtaaggattgtaagtactttccattatactgaagacttggaacaagttctgattattacatattttagcatagatgacaggatgcatgcaatgtatcagcatgtaaaatgaaggaaagatagaaaaacagttgcgacaattttgtgcagtagtactatcgtgctgctatacaagtaaaacaatttaatcacacataacatagtaataatgcttacttattgctagaaaaacaggattttaattattttaatgataaatctgctttataattaggcagaaaagcaagctgtgaaaaagcaactttagtatttaattctagtgttaatttcaaaaacaaaaacaaaaaaaacccctgaaaaacaaaagaacacaaagacaggttgaaatgttccttttagggtattacatgctgtacagtgctttgtagtttaaaaagttttatgcccatgcctgaatgcattttgattctcaaagcatcttttggggtaggtttggcaggcactattgttcattcctacaaatagtttaaaatttttaagaaaaacattttagtactttattgaaaatcctatatttgcagccttcattcttaatgtttgtagcacattgaattttattgattgtaagacaaatttatttcaactggattgttgaaataaactctaaataactctaaaaataaactctaaaaatcatggtcacggaggttgagtcagattatgcttgccatttacctgtgcatgtgcaaacctcaaatacctcagccttaaaacttggagaatgagtgttcctgtggaagattattcttcagagatgatagtggagtactcttgaaaaccctaggtaccaaattgctgcagaagtatttgaaggacctggtgaatctaatatgttttaccaacatactacaagttgaaatcaaaagttgactgctcgtacataattgcaaagtcagatgtcagatgccaacatcaaaagctcttcaaaaataccacataaccaatgctctttgtaacccaagggatgacactgtgtggaaaagcacaaacatcaagaactctaaacctaaaagtgatttagacaagttaaattccaaatgtgaagtaattatagactgttaatatatttgccttataaatttgtatgtatatgcatgataaaaatctatcactaattaagggtaaaaaacttgcaacaaaaataagctttctagatattaaaaagcatatcatttaattgaatagatgttttccttcttgttacacagaataaggtgtatctatgtaataaagacgtgtaggatttgagtaatgctgtgctaaatacttactatcttgagttctggtttggagctatattgtcccatttatctgtctgtcaattcttatgctagtaccacaacatttcaattattttatgcctgtaagacatgctaacattttagggtaagatattatttctctattattcttcatttgcaaaattcgcttggctattatttcatattagtttttcaaatgtaactgcagaattagaatgcagaattgcttctcaagcacaccacactgtgcagcaagtgaaactgcactggagtcatgagcaataggcattttccacacttgggatctagaaacacaagatgcctttccattttttctgtttttcaaacgttactgtgtttggtaaagaaggttgttttttttttgtttgttttttgttttctgctctgggctatatatctttcaatgttaactttattctctaatagattatttcttctgcttattgctgaaagatgaacaacaaattttatgaagatttgtgtaagaatagtggatgaaaattttggtagatgttagcatttgcttatttggaaacacacgcttagagaacattcccactctgaccagactagaaatctgaggtttgacaagagtgacttaatttcacaccttctctctctgtcttttttttttcgtgtaaagaaaacagtcatcagcataagatttaaaatcttaaatgtacaatatgtttgactcatctgatacgttccgcctttgctgcaatggccttcaatacagtaaaaataaccacactcatgcgttagaatcatctgtgcaaactaaagtatatggcaaaattttaaagaaatcaccaacttcaattaatttattttgaaagaaagaaaaggaatttgcagtaatacttgaaacatttaaaatgaggattttttaaaaatatgctattaaaaatatgaatttatttaagacaatctgagatgactgaattataaattgtgtaaaaggcaatttagaatttttaaattatcaatgtatgtaaaatataggatatttcatttgttgcattgttaaattattgcttattttttaatagcataaaataaagtaaaggctatgttttagaccaatgttagtttttactcttatctatatataattggtaaatggagaaaatgtcagtgagaaatctaaaatcaaaataagatatgatttttaaataaattgtacagtaatttttctgttgaaattatgaacaatataaatattttatcatagttttctgtagttttcaaaatatcatatttgtggatataacccctgtttaatcataaaaaattataaatgactaaagataaaagaggaaaggaaatagagaagaagctattgtaaaaagaattgaaaagcagtgttttcctgctatttaactttgaaacagaaaactttttttgttgcaatgattcttcactacaataccaaaattctgaagagaatgttttcaggttaccatatcaccaaatcagcatagccagagaccaaacagtgagctctaaactatctttactagatttgaaactccagcatattatatttaccaaggtaaattatccctcttatgacaagtttttgttatcctaactgataatttagaaaactaaaggtcatttagtgtaaaaaacatagttgaaatacaattactttctcatatgtatcttaaaatgatatttcaaacttccttatgcagtgttgctatctgttaattctcccatatatcttattgaactagctttttttttttttctttttctttttttgagacacagtctcactttgtagcccaggctggagttcaatggcatgatctcggctcacttcaacctctgcccccaagttcaagccattctcttgcctcagcctcccaaatagctgggactacaggcatgggccaccatgccctgctaattttcatatttttagtagagacggggtttcaccatgttgggcaggctggtctagaactcctgacctaagggatcagcccacctcggcctcccaaagtgctggattgctggcatgagccactgctcccggccaactagctttaactagaatattatcttcagcctggcagttaaacaatttagtccagtagttacataccttaagaacatttagagaaaacaccaaaaaattactaaaaattctggtaaaattaatacccatgactagagatatgaaagtctggcattaactaagttgagaaagagctgttggaacagtctggagaataatatgaaatgttagaatgcaaggtcaatgaacagatggttctgcatttttatagctaacactactaattggaatggatttaaaatttagcaaacagagttcttcaagtgcaaattgttaagaaagagaggcatacattctttctaagtggcttggtggttgtacttgattattatggactggatgtggactagataataagatataaaattgacaagagataccatggcctgataatggtactcattttttatgtgtatgcataatttaagctatgtttttcactcatatgttctaatcactttgcattttttctcctgtactgtgtgggatttgagagtcgaggtgaaaggaagaacccaaacaaagagattgttcttaaaggcatgttagggtcctttgggttaattatacaaggtttgctgacagcgcctgataagaccgttgaggtcattctgttgttgacgtctcttcaatctcaatacgccactcagcaaaggccaaggcagatagagcttttccactatctttatagcacaaaatgctacgctgaagagagaaaacacacactctctctctcattcttacacccacacaaaacctgagaagcccaaactgccacacactttgttgatgacaaggtcagcatgataccttagaaccattcatttctttccactccacttcactttcaatatgcaattttaaacatcataatttttaccaccagaatgttacaaaaaatgtctgctaattgctttgtgtccaaaaaagaaaccaaaagaaaatggtattttgctttagacactaacaaaatgtaaagggtaaatgaagctatgtcttagtagtatggcagaggcagaggagcagggcaagaaacggtatgtaagacacgaactagtcactagtctcacagttctactgaaaagtgagctttatctagttgatgacatcatgcagccccatgaataataaatgaatacatatttattgagtgcttattaagacctccgcaaagctctgcctctgtataaatgagtgagatgaaagcactgttctcacaggaaggttataaaggagctgggggaaacattaatgcaagacacagatcataagagagaaacttcatagtaaaaacgataaagaacacatgagttcttccagagcaggggtccccaacccctgggccgtggacctggtacctgtagtggcctgttaggaaccaggctgcacagcaggaggtgagcagcggtgagccaggaaagcttcatctgtatttacagccgctccccattgctcacattaccacctgagcttggcctcctgtcagatcgtctgtggcattagagtctcacaggagagtgaatcctattgtcaactgtgcatgcaaatgagctgggttgtgtattccttgtaagaatgtaactggctgggtgccatggctcatgcctataatcccagcactttgggaggctaaggtgggtggatcatttgaggtcaggagttcaaaatcagcctgaccagcatggtgaaaccctgtctctactaaaaatacacaaattagctgggagtgattgtgcatgcctgtaatcccagctactcaggaggctgaggcaggagaagtgcttgagcccgggaggcaaaggttgcagtgagcagagatcactgctctccagcctgggtgacagaagatcactgctctccagcctgggtgacagagcaagactcggtccaaaggaaaaaaaaagaaaaagagagacagagagaatctaactaatgcctgatgatctaacgtgggacagttccatcctgaaatatttaccctacacccaagtttcatgggaaacccatccctgctgccaaaaatggatgggggctgctgctccagaggaccgatagtgcatgaccattaatctgtgtcatgggagaataaggtttttttgtttgattgttttttattgttttttattttatttttttttggagcccccttctgggcaagaaagaaagggatcgatgaaaaatatgcctcctatacagaaccaagactaaaagggtcgaggtggaataaaatgttcctatagttcgtaagcagccgtagtttggagtgctttggcatgtatcaatggaaagccaggatagtgtggttaggaatccatactctgtaaaaaaaaaaaaaaaaaaaaaaaccctgcctgtgccatttggcatgcttagttcaattattttgaatgctataaaaatagagatggaggagaaaaaaagatttcaaagtaggaaatgaaataggaagaatgttcaggcagagattgaggcaagaagggagtagagcccaggcagatcttatcaatgtgaatcagtctcaccataagtcctaacttccctgttgggaaagcaacagctcaaccagagaccagaatcataggttactgaaattgaagggcccagagaagtcatcttgtcaagcttctgcatcttttttatctcatggatcctactgactggtcataccctccaaaattctgagatttaaaaaatgcttacaataagttatttttctctgttaaatttctcagtcagcattggctttttttatttgtttgtttgttttgagacagagacttgttttgtcacccagcctggagtgcagtggtgtgatctcagctcactgcaacctccacctccctgcttcaagcgattctcctgcctcagactcccaaatagttgggattacaggcacccaacaaaacaccttgctaatttttgtatttttagtagagatggagtttcaccatgttggccaggctggtattgaactcctgatctcaattgatccactctccttgtcctcccatagtgttgggattacaggtgtgagccacgcattttcttctcttgtttctttcaaagtgaaacattacatgcccaccacaggaaattctttaaatgtgaacttcggaaattctaagaagcctgcatctgaaacagttatcatcagttggagttttattaacggccctgcgagactaaacaaaaatctgtgggcctttacagctagttcagagaactgggaatgagatgagttgtggttgctaaaaacataaacttactaccactctatgatattatttttccacactggcttttaataaatacgaagccacaggctgggcgcagtggctcactcctgtaatcccagcactttaggaggcctagtgggcgagtcacctgaagtcaggagttcaagatcagcctggccaatatagcaaaaccctgtctctactaaaaatataaaaaaacaaattagctgggcatggtggcaggcaccagtaatcccagctatttgggagactgaggcaggagaatcgcttgaacctgggaagtgaaggttgcagtgagtggagatcgtgccactgcactccagcctgggcaataagagcaaaactctgcctcaaaataaataaataagaagccacagaaacatggattaaagcaaaatttccacacataaccttagtgaaagttaaaacaaactaggattctaaatagtccccaaagtgtatattaatttacaattaatttattcagaagttttacttgaaaacttttctctagcatttataactcttcttatttatgctgttaagtgtcatggtatatatttaaatcacacttgtttggaataacaagtttgttttcactaaacatttctgatgtattaatatcatctgctttttacctgctatcagtaggaatgttaacagatttcgatatcttgtctcgttaacaccaaacaatgggtgttaagatgttttttaaaaaaattccttgttctcatgattatatataatatatgttatatattatatataatatacttaatttataactattgtatatagtgcataattttcaaagacaaaaacaattgaataagagatagactttcttcttataagttcatcagtttcaaataatcttgcatgtattacccttcctttttattgtcgtgttaataaagcagttttaaatatagctgagcttaaaatcagaatgtgtgacttttctgttagttcatagtaagttaccacaaggcctgggcccttggttaaagggtttgcctgattaggtcaggcttattcaggatgatttccactttgattaattcagagtcagcttgtaagagttcctaattacatctaaaaaattctgccaaattctattcgccagaaataaatcacaagttctgtcaatattcatggtaggatgtgggtggggaacgaggtcatacataggtgtccggtactaaggtgtgacaatcacagatgccatcatagaattctcattactacctaagaacgaattcaacagcagtatttcacccggaacatagtagctctcatttctaacttctctcctgtctgagctacttatggcataatgaaaacaaaaacgaagagctaattgcaaacttatgcatctataaaaattttcatttaaagttaatattgttatgtgtgtatttggtcctgtcattaggatgttagctggttattttgctcgttagttgacgcagttttcttcctagccttgatggtctttacattttggcatgtttttgcagtggctggtactggttgttcctttctatgtttagtgcttccctaaggaggtcttttagggcaggcctggtggtgacaaaatctctcagcatttgtttgtctgtaaagtattttatttctccttcacttatgaagcttagtttggctggatatgaaattctgggttgaaaattattttctttaagaatgttgaatattggcccccactctcttctggcttgtagagtttctaccgagagatccgctgttagtctgatgggtttccctttgcaggtaacccgacctttctctctggctacccttaacattttttccttcatttcaactttggtgaatctgacaattatgtgtcttggagttgctcttctcgaggagtatctctgtggcgttctttgtatttcctgaatctgaatgttggcctgccttgctagattggggaagttcttctggataatatcctgcagagtgttttccaacttgattccattctccgtgtcactttcaggtacaccaatcagatgtagatttggtcttttcacatagtcccatatttcttggaggctttgttcatttctttttattcttttttctctaaacttcccttctcgcttcatttcattcatttcgtcttccatcactgataccctttcttccagttgatcgaaaatttttgcaacctactcatctgacaaagggctaatatctagaatctacaatgaactcaaacaaatttacaagaaaaaaacaaacaaccccatcaaaaagtgggcgaaggatatgaacagacacttctcaaaagaagacatttatgcagccaaaaaacacatgaaaaaatgctcatcatcactgtccatcagagaaatgcaaatcaaaaccacaatgagataccatctcacaccagttagaatggcaatcattaaaaagtcaggaaacaacaggtgctggagaggatgtggagaaataggaacacttttacactgttggtgggactgtaaactaattcaaccattgtggaagtcagtgtggcaattcctcagggatctagaactataaataccatttgacccagccatcccattactggttatatacccaaaggattataaatcatgctgctataaagacacatgcacacgtatgtttattgcggcactattcacaatagcaaagacttggaaccaacccaaatgtccaacaacgatagactggattaagaaaatgtgacacatatacaccatagaatactatgcagccataaaaaatgaagagttcatgtcctttgtagggacatggatgaaactggaaaccatcattctcagcaaactatcgcaaggacaaaaaaccaaacaccgcatgttctcactcataggtggaaattgaacaatgagagcacatgaacacaggaaggggagcatcacactctggggcttgttgtggggtggggggagggtggagggatagcattaggagatacacctaatgctaaatgatgagttaatgggtgcagcacaccagcatggcacatatatacatatgtaacaaacctgcacattgtgcacatgtaccctaaaacttaaagtataataataataaaattaaaaaaaattttcatgtgaacagaagactgagggtcaaaagaattgagaaaataaaataagtttacttgaaaaaaaagttgcaatgaaatctgattgcagaagaattggctgatcaaataaaaacataatgtgtattttaaggaaacaatgcaaaattatcaaggttaccaagtgtacatcagtctaagaatttgtttgatgggtttttatgtttgcttattttaaagaaaaatcaatttgtaagaatttcaaaacagcaaaaatgcttcatgttgtatttatattaaattgacattgattaaatgatgcctacttattccttagaagtctatccatgtaacatgaatactcttattaatgtcttagaaagtttacctgtatcattaaacccctcaactaaacctctttgattcttcttaatttttttactttatgttcagacagttgaattaaccatattttgttatgatacaaaaactcagttcctgtttattgttttaactttgtgctttttctaagttaaatggctctcacattatattgccatcgtcattagcattatctaagttcttctaaactttattgctgtgacaaaaatgaggaagaaatactgctttctaaaatgacattatgacttctttgctgtgaggtctgtgttgtaaatcatcacctctattccccaactgtgaaaggtaaagtccagtctctattgctctcttgagttttaaaacaacataacgtatttggaggagttaaaagaccttgctaaatattggtctgtgttaggaagtgtcaaaacatagacattacatacagaggaaagaagacttcaagggttaagtacattttcaaggtcatgacactacaaaatggcagagttggggcacacatacagaatttcagagtccaaatttttaaccaattttactttttttatatcgcattaagaggaatttatttgtatttccatgtatttacatgttgtacactattcatcttgtaacagcgtcacagtttttcaagtgaaacattttattatatttaaaatttttgtataaatatagctggaattaaaataattacataaaacaatgtttttaatacttttaacatctttcttttagaatagtcttagatggatcttgcacacgtattccaacaatgatgtaattgattaaaaataattgaaactatttattgaatagtcatctttttaatttatcatatgccttttattatcttaagcatgtaagatttccattgtttgatattagatttgaatttttggaaataagcctaacagtcatagaaaacagacttggtagataaaatatacaaccagcctgaataatacatttctttgtttttcctcaaaatgatttcataatcattaatcggcccatggcttactcctttggtaccatggtgtgtaaaatctataacatttctatgaaatcatcctcatctttgggagatttattataaacaatgacaactgaggtaaaaaaaaatgaaatagatatagtcttctcttataatttcaattagcataattctgtttttttttttttttttttttcgagacagagtctctctctgtcgcccaggctggagttcagtggtgcgatctcggctcactgcaagctccgcctcccgggttcacgccattctcctgcctcagcctccctagtcgctaggactacaggcacccgccaccacgcccggctaattttttgtatttttagtagagacaggatttcaccctgttagccaggatggtctcgatctcctgacctcgtgatctgcccacctcggcctccccaagtgctgggattacaggcctgagccaccgcgcccggccaggggatgtcttatttctctgcaaactttacaacgaaactcttaaaaaagacatgttagtactatggttttaatttttcttgtctcatttttaataatttactctgattaggctttcgtctccaactttctacaaaaactattcttgtcaatgccgtacatattaatgcctcctcctcactgagtctcatgcttagtcctcatctttcttgactcaacagtagtacttgacatggccgaactatttgcatccttaaaacacggtcttcacttggcttcagacattacttgatcttgattttccttttacattatggatcatatttcactcttttcccagtgttcttgaactccaattgttgacatgccattcttctcagtgcttgggcctctttatctacattcatggattgcatagtgttttatgcatttaaaaatcacccattcagtgagtattcccaaatttatatctctaatcctgtcttctcctgaaagcctcagacttgtatcccaactgcttatgtggcaatgtagactaataggcatctgagtgataaaaaattttcaaatctactaaggtagtttgaaatcctcttaaataagaactaagcatgacagtcaagctccttgggaaactttacctggaaagtatgttatatatccatacacctgacaaaggtagtagcagcactgggatttgcaacctcttagattactagggcctattaaaacaataataataataataataataaactcctctgtaggataagagttataattattgatctgtatgaataagataatacatggcaacaaacctttatttaaattgatttacaatttaagtttataatgcattaattacaataaaagctgtatttgttcaaaaatattgctaggcataaaaatagataatatttattaacgttagctaagtcaccataggcccttcacatatactgctaacttaaattgaggaaactattagtaagacttctgctttacactcaacgagataatctgcagccctccagaactctgtgctccacatttagataactactcatgaagataattcaacactaggagtcagagaaatctattcttgttcatttttcgctacttaccagttatgtgactttgataaagccacttatccactgtgagctttagattctaaatgcgtaaacagacatcctgttgcgtggtctgccttgcaaggtttttataagatatacataaaattaaacttgaaaacacctaaatgtgagacattatagttatttctgtagacacagtctaattattattgtagacacaggtatattttattcttcagttcctctcttgttagtatttttttttttttttttgtttgagacagaatctcactctgtcgccccgcctggagtgcagtggtgcaatgtcagttcactgcagtctccacctcccaggttcaggtgattcttttgcctcagcctccctagtagctgggattacaggcacctgccaccacgccaggctagtttttgtatttttagtaaagatggggcttcacaatgttggccaggctgatgtcaaattcctggccttaggtgatccacccacctcagcctcccaaagtgctaggattacggaagtgagccactgtgcccggcccctattttgttagtcctttaagggaccatataatcatataatatagtgggcaacctggtctctttctctacagattcaatttctaatcacgaaggaggagaaagaaattgagttgtgtctttgggtatattcttgtgaaatgaaattcagtggagtaaggaggaaaatatgaggcatatcaatggcataaatatttgtattttgagtggtgtagttggccaaaggattggcactagcttcaggtgtgtcctacttggcagtggtacaagtcaacatggttgtatgtgtcagttttgttacatattcaaatgtacagtataacaggagtctcagaggacactgtgatttctaaaaataagtaaggtaaaaatgggtttgtagttttagctgtttgtcctcttttgttccaattgcatacacatcaaatcaaattattcttgtggactgtttttctttatatgttcttcttctgtacccacatagaagaaatcataaactttaacaagatgataatttacatatcaaaaacttgatttaagccatagccagtacataaaaattcatttttgtttagtaggtttatgtctaattagctgaccaacagggggtgtgctaatagtgtcagataactgaagtaaatggtatttaacagcatggggttccaataacacaggagaacacaggagcaaccttctaggctttatttcattcaagtccataaagtcccctgtggtcgcagcagtgcatatttaaaatcagttaatcatgttactcatgggtgttggatatctttcaaaatggcctctggtaatgagctatttgtcctgcattgtgacaataagtctcttccataatttataaagctcatgcagatgatggttagagattccataagaaaataatgcagggatgttctacttcctgcttaattcctacttaaatacagttagatactataagtgcataaatctacatagtccacaatacttttgtgaaatatcatttcattttattatgatgatttttgcttttgtcttgttcaagtagttttaaattttggatgtgttggtgggtataggagtgactaaaagagagaaatgtctattgacccaactggtacttttcatactttttttccattctgtcattgtttgtcttaagtactctacattttgtaagcattgatctcatctttgcacactgtagtgataaggggtatgcatattcttacacatacagcttctcccctgacttaaccaaatatatcaagcaagaaaaacaaccctcttcagctagaagtcttcatcaagaaaacatatatgaagtatacatacgaatacacacacacacacacacacacacacacacacacacacacacgggagtttacaaccatacattacagagttctgcaaactcaaatagcattccattttctggacaattctatctgtagacatcagatgtactcgcaaaccgtacattgttgtttaaagttcttcaataagagattctaggcttttaacctgtgtttataattctaacaatctttgcatttagaatgcaaagtcttgaactctaacctttaagatgctggttttttacctttcagaggtcttctgacagggccctgccattgtacttccccatttcatatccttattgcccattaattaatagcttcaaggtttaaccgaacatagcctgtggataagttcttcttcatgtgggggtgtgggaggtgtgtacttcctgttctcaattccagctacaggaacatcctctctcaaacattgacatgagaacaagacagtgtaagacagtggaatcaataagctaatgaacatcaatacaaagtaaattctttcacctcaatttgaatgtgaagtaagattaatccttattaagaaagaaaatgatgcaaaatggataaatgtgaccattttgttttatcatgttattcaattcatcctaactgagcagttagagattttctagagtttggatggagaagtggatcatggtttcatgtaaaatattgattcacatggttttcagctttactagatcttggcaaacctttcctcctcccttcaaacacacacacgcactttctttaaacattctactttccattttcctttaagctcctaagcatgacaacctgggagcccactgtaaatgacttttctccaggtcgctgcttatggttacaacttctacacagaaaacaattttgccagtatttccctcatctcatcaagcacagcttcctttctgcaaaaacgacagcatccaacgtgcaatgactgaagttattataacatcttgttcaatgtaagcacagctgagttccttagaacatggtttgcctaaaggtcagatgctcaggctcaggttgggagagaaatgatattgaagggacaaaatagcaaacataagaagccacctttgctcatttctgcttcccagcataatttcccaaagcgcttggccctgtgacaacatacagtgctccaaaaaaaaaaaaaaaaaaagaggtcgaaacaaaataaaacataccccactacgtctcttgcatgagtcagtattccttaaaaaataaatgaccctaatcattgcttttttctaacataaaataatgtctgataggattaaaaattatgcctctataatctgtaatcatgaatcatataatctatcagtatcatataatctataagatcatatcttatcatataatctatatgagtgtagcttatagattacatcttatagataagatatactcttgtccctcattaccttaggggaagctctcgttcactggcagattgccatggctaattccagctgccgttcattcaaatgttaatacggatataggattttatttatttatggtagagttgtaggaaaacaaaatgtctctattaacatttctctattttgctaaaatattctgaaattataggctctgataaataatatgttatatcttataggtaagatacactgttacatccaaactttaatataattttacaggtactaaccccccattacctatatgtaaacatcagaatcaaaaattgatcccttgacttaactgaatatttaaacaagaaaaacaatcatctccaggtaaaagtcttcatcaaggaaacaaataagaagtatacacataaaagaatgcaccccgccccccgccacacacaggactatacaaccacacattaaagagttctgcaaactcaaacaccataccattttctgggcagctttatttatttatttatttatttaattttatttatttatttatttatttattttttgagatggagcctcgctcgcttgcccaggctggagtgcagtggcatgatctcggctcactgcaagctccgcctgccgggttcacgccattctcctgcctcagcctcccgagtagctgggagtacaggtgcccgccaccatgcccggctaattttttgtatttttagtagagacggggtttccccgtgttagccaggatggtctcgatctcctgacctcgtgatccaccctcctcagcctcccaaagtgctgggattacaggcgtgagccacctcgcctggcctgggcagcttgatttatgatccgtaggcatcagatatagatataaagtaaaaccctatgtcaaaagagtctgaagaaacacctgtctaaaagattttcctggactgtagactttagtctatagtcctcaagaaaacttctaaataaaacttacttccattctttaaaaacttaattttctttcactcaacgcagacctgtggagactaatgaaagaaagatcaaaggaagatattccagctggattatgaaggttgaggaaagatcgtattaatatgtatagaatttcaataacagcaagctaaagattgttgattagaattcattattctagagagtgttaaccagtttgaagagtggtctttttctaatttcaaaagaatccaacaacttaaagcagtctaaaatgatgattcaactaatcactaaatttaaaataaactgagcttgatatgattttaggttaagaaacagaatctacaaatgagaaagaaagccagtagtttatcctcctcctttgctgggttatgaggctggagtgggaaggaggtcttggattctgtttctataggtgaagaaaatcaggggcttgatacatcgccttactaggatgatgccaacaataaagatttcactgttagtcctaaatcttgtctgcaaagcagctgctgttatcttctctttgctgtggttcatcttaattagaaagactattttatggtaggaggaagtatagtcccatttattttgattatactacatgagaaattctaaaatcagagggttgaccctataatttagagagaataggaattttcagaagtgaatgtgtgagactgggcacaatgccattgtaatgaagcataaggcatagacatgccacttggaaatacatataattttttatgtaatgagtctgggaagttgaggaaaacctctcaaggctttcaaaactttctcttctgtgttcaagaaatagatatgaagacatgaatcaagttactttcattcctaaggcttcagtcatctcatctgtggaaatcaggcacttggcttccacgatctctaaagtctatctaactccactatgctgtcattctaactcttgaaatttttggtaaccacagaacattctaatgaagaaacagcatattgtcccttattaccttaggggaagcccttgttcactgacagattgccatggctgattgccgctgctcttcactccaatgttattatggatatagggctttatttatttatggtagagttgtaggaaaacataacatctctatgaacatttcactattttgctaaaatattctggaattataggctctgataaataatgttaatattaatcttattataatgtaatagcatattttatgagcttaaattcaaaagtatcccaagtgactttgtaaaaggaattctatgtgaatatatgtgtgtgtgtatgtgtgtgtgtgcgtgcgtgcgcatgcatgtgtgggcgtgtgaagttttgcagcagcaatagaagttgtgatgatatctcaaataaattcagtgactttaatattcttcccttttaatccagagtaaagtattgtggtctgactgatctctttgatttataaatctgaaaaaacttctctttgcttaaggggttcaaattaccttagtataaaatgcaaacttcttaacataaaataaagtacacctcagtaccagaattctgttagcctgtgtaagctttaggtccactgtttctctacctgatacaatctgaaatccagccattctgacctactttcgaatgcctgaattttctattttctttccagtgttaagcctttccagtgtctctctcctttgacagaagtacacttcccttgcctccttgcccgcaaactccttttcattcaggtgtcagctagacacatttgactttcagtgagtgggttataatcctttcatgatatcagttctacatctgagcacaaagatagacctaagattttaattgattagttaactaattcatatttaatgagcatctactactactgtgtaaaaacgtcacaaggaaacataaatatgaacaagatataaacccttgtttaaaatagaaatgtggaaaacacagacttattaatagtatagaatatcacatgcgaaatccaagtgctatgaaggtttagaatagagggagttacattttgttgaatttagagagcaatttatgtggatgttaccatattcaaagtttgcaagctgtatttgccctaaagacctttagctctgaaaggtacctctcaggctgctcttgggtgatttggccaaatatcaagtgagcaggtcttggatccccagattccagttcagatggagcagctccactgtattctggggcttaaattttgaaaaccactgtgtttcgactgcaataatggtatattatgacactaatggatattctccaggtgtttttcactatcaagaaaattgatgtataacaaacgtatccccttgaagtggcacttatttccccagtcactgacatgaaacagtgattcatcaattcgtggccttaagtgatactgaggtaactcaagacactatacacttgtcaggtgcattcattttcttctattagtatttatcagaaattacatataacatcgtgatgtttaagaacagcttagtaccctatgttaattgcaaacatgtcaatattttgtagcaggaattctgggttttgaaagcaagagaaaaggacatttcccttaagaacgacaaattcctgaaatacctgtggaagaaaaatgacatcttaactacagtacgactgacccatgaactccacaggtttgaactgtgcagctctacatacatacagcttatttttcgactaaatgccatttggaaatacaatcttctcaggatgcaaaatttgcatattcagagggcatactttttgtaaatgtgtgttttgtagggctgactgctgggcttgagtatgtgcagatttggtcatacctgggggttctgtaaccagtcccccacgtgtaccaagggactgtattttcttcacttgaatatgtgtcatagtacatgatttaaactactttcaatttctgtcttaatcctgttttgaactaaactaagtatgcttctctaggattcaagtgttcactgtatgaggtaaattaactcttccagtgctctagggtagcaattaatgccccagaggaggtaaattgctaaatggtaccccacagctttcggaagactgattctgtgtcgaatggttatgttcctctctggtggagagtagattactcccagtggttctttataggtcaggatccattttcaagtgggaaattagatttcatctgattggcaagctaaagcttctgaggtgtgtcatacaatagtcacgattagcctattgaagacataaatgtcggttatggaagctcaaaaagacagtaaataaatatgaaggcatgaaacaaaatattgggcagtactgcatatttgaagttttgtaagcaagtgagatttgtattttatcatgagctggaattttatatctttacttagaagcatagactattagtggtactccacaaacaccacaaatagtattcattcctctcttcatttattaaaaaatatataaatagatatatagacatgcagaaaacttttactctcgcctcctctttatgcatggttttgtgtgtattgcttgaatactctcactgattttaaaacacagtgctttttctatggatcttactctttggaaattttactttattttgaaataaaaactactttactatatgttatttgctcataatgtacaaatagttttgagtgcctattaagtatgatgcactacacggtgaaaacaaagcctggaatcctgacttcttgagctttacattctaacgagaaaaacgaaaacaaagctacacacataaattattacattgtgaaaagtgcaaggaggaaaacaggtaaggtatgaggtccaaggtagacagcacctggggtcagggaggtgggaagcagccacagatgaagtcgccattgagcacctcattcataagaagacacgcttcatcccgaagagtgtgaaggagcagcctgtgaatggcagagtggggtcaagtgattaagtgcaaaatcccttgaggcaagaaatatgttttcatatctgaggaacttcaaaaatacccatgtgactagaacaagctgggtggtatgagttcagatggagggaaagttggtgtcaggtcatgtaaggccttgtaagctaaaaataaagaagctgaattctattctaagtctagtggaggaagggttttaggtaggggagtgacacaaactgaattatagcaaaaatagcaatgatattaaatattcacacagcactttttttttttttttttttttttgagacggagtctcgctctgttgccagactggagtgcagtggcacgatctcggctcactgtaacccccgcctcccgggttcaagagattctcctgcctcagcctcccaagtagctgggactacaggcgtgtgccaccacgcccagctaatttttgtatttttagtagagatggggtttcaccatgttggccaggatagtgtcgatctcttgacctcatgatccgcctgcctcgacctcccaaagtgctgggattacaggtgtgagccaccgcgcctggcccacataacacctatttataccagagagtagcaatggtattaaatatttacatagcacttataataggccaggcatttttctaaggaatcaacatgtactaattttttctaataatcttatgacatagaactaaagcacagagagattagatgacttccgtaaaattgtggagctaggatgttgctgaaccaggattcaaggctgggcagtcacttacctgtgtggtagctagtgttctatgaatctgtctctatcgtctatctaacttctgtatttccaatctatttacatcaataatttaactgttaaaggttgtgcataagcaccataaaatggcacttgagttcatgggaacagattatatttttcagagaaatcattgttagaacacccaggactgagctctaagtgactctaacagtagagactgggtagaatgatgaaactgtcaaaagaaattaaaattagtaacccagtaataagaggaaactcaggaggaagaggtggcgaggaagaggtggctgacataggggagagtcctaagacaaaatcagaggtcaatgctgcggagagttgaaccaaatgacacgagaatatttgctagattacattgtgggatgtgtccatgaccctgagaagggttttcatgaagtaggaagttgacagacaggatcaagggtggatgagagagaatgctgacttagaacagggaggcagctcttttgaatttggtgttgtgataaaagagaaaaacagctggagaagaatattgggtcgagggagaacagggagccactggggatgccgaagagaaaatgataatgaaaatgttggctatgtagaccttcttgaagggacaaagcaagagagaattcaaagaataaatggaaggttcagcctttgatggaagagggacattctttgatcatcatacaagagaaaaaaagttgcttgcagggttgataaaggatggaaaagggcgaatcatgagtaagatctaataccgtttgtaaggaaccacactctatgctaaatgttttacatatgttatttcaagtaattctttcaaaattttaaatcattattattttttaaatttttaattaacaggcagtggatcttaggctcagaagaattaagtgatttgcccccaactgcaaatccactaattaccagagctgaaaaattaaggcaatcagcctcactccaaagcgtgatcagagagctaaaaatttacttagttattgaccagtcaatttgaagcccggagaactaaggctgacttacagagtatatgcaactcactgctgacagagtttcgtttagaatgcagttctcttcactcctactctagtattcttttcactgtacttatctatttttttcaattgctttagaggcagtatacattttaaagtaaaaatatatgagtattaattataaactttattcactgaaaatgtagtggtaattaagggaggaaactgtaatgattaaaattataagaatcaaatataattggttttcaagagagaaaaaaataagttaaaggactccgtatgactactataaattctcctagtgagaacaccaagtatatacaattagtttaaaaaaagaattttccaagttctttattaacttttaatcagaatgcaaagataattagacacagcctgtttatgtatggaacaatacaatgaaggacagtgttctgctttttggaagacacatacactacaggaacctttgaacatgcaattcagaggaagtttaatccttctgttaacaaatctgattaaaaatagcagtggcaatatttcaaaagttacatgtgtgtgtttgttaaatatttcttcccaatgtaatcgttttttaatcttcaatttttttcttataaatggttgtcaaatttacaagcccttactataaaatcccaggagaacttttaaattccataagaaaactgtatggtttttattcagtcttattatttattgtatactttcactctaattatgtaaatgtggtatcttgcagaatttttgtttgttttctttcttttatccaactgcctccaatgcaccacttcatatgcatgtcttttactctagccattgtgtgttatcataatcatgtctacccagagttcaaatggcttaatacaggtgtcacctcacagcacctctgctcagatcctgcagactttgcctctctctaaggaccctcagcagggcccacaggattgagcccctgttcctcaaaatggtggccaaattaataataaaacttgttttggtttccctttttccttttcattccctcattcttcacacatgctctccaggatggcaaactccaatgaactaagcactaaaacacttatagtaattaaatttctacctggagaagcataaaggacagatacatgtgtctttacttttcatatctaagtgacaaaatgaatcttaccttatcaaaacattcacagacacacacacagacttttatgtcagtgttttacaactacttgtctaggtttgtgattttataaaacaaatgttttagattagttaaaatattagaatttaactcattatgcacaaatgaaaaatgtgaactataatatggcaatgagtcagttgtgttttctttaaattaatcacgtggtcaaatgaaattcacaaaagagcctggggcaaatattttttgatatctgccattagatatgaaaacatgtctattaacttaataagccagaaataaaggggctgcttccactggaagtgaaaatgagagtaagtgtgcaaagtaactgaagttaaaccagtggtactattcctaattgcagtcacactaaatggaagaattcttatggtctacatcaatgctatacattaaaacgtgtattggcaataatagtgtctataataatgggagtatccttatttttacttcaattttcctctcatcatataatttgctgtgtcagactcaggtgaaataaagagggatgtatatatggatatagatagatatgtatagatatatatacacatagatatttgcatactgatggtgatttttgtgcatgaaaaagtgataatgtgttttctactagatttaatcattttctcaaaattctgtgacatagtgagaatttagacctgagagttttttcttaaaataattttttttatccgttagtctagaattttttaaatgccagaattataaattcattttgagtttttgggatgtatttctgataataacatttttctaatcaagtataagttattagagtattaaatactttaataagtatacgttattaaaaaccatttatccggacaaggcacgtcaattgctttgaatctgcagggaagaaaccgtgtgtcacattactcttcagacaacaatcataagaaataaacctacaaacaccaaacttcaaaaaaaaaatcctgcacaaaaagtatttttgaaatcagatgatgggcccaagaagaccaaagggatttaggatatgtggtcaaagttgttctttgatgtgtgtttgtgtattcagcttgtccatccatcaagggctccacctgtcttggagatattgtccatcatttatttatgtgcagagagactaaagtccgaactgatcttcatttcagtcatgcactgaatataagaattgtggaaaacattttggagctaagatacaccctttttttctgaaaagagaagttgtacttcacaggcattttggagtcttccagctcagatttacttttggaaaatgacataaatttcatagataatcccctgatccatctttagacagacctcaacattttgtcaggtcaaattatgaaacagaatcttacataagttttctcaatcatatctttccttgaaagaccatagttaatttcaaaatagacagtatatgaaaatagctgccttgagaaatatcagttaaactccagcattgtatgagaaccaatgaacaaacaacattctcatctctgccaaagttttcaaggagagtgcatgatttcatcctttagccatggtgattcattgttgatgactaatatcatggatgctcacatttatggaaagtactgtattgacacacattgtactacctgctttatacacatcgcctaatttaatcctcataaaaataccatggggtaattattatcaaatatattttaggttaagtaacctactcacttatcttgtaagcggcagagcaaatgcagttatacatttcattctatgcctgcatgattcagaaaaataaaacaaaaacatgtaagcctttggtgtacttatatatcaaaaaccaatttctttaatataagagtttaaaaagctgtacataatactactgtagatgaaacaaagtgtaatggaagacagattgaaaggaaatttgttactattaggatgcttgcaatcaaataatggggataaaacaagcacatacattcctcatctctgtatagacttaacattttacagagtcctttgagagactttaattttattgtatcaaatttttcatgtctaagttatctattcctttcagtctattctgtatgtaactcaattgcctttttgcctttgctaacacagaaatccattaaaatttttaaattaatggacattttaattacatcttcttccttagtactaataaaaatttatatactatgtatatgaatatgcatctagatgactatttcaatatcaatatatgaggagataaaatgaattttccacaaactatgattctgtgtcatctaaacattagcttgcacaggccttttaaagaaagcagagtgaggactccctggccagtgttctctaccatctcttctgcctaccttcttttctctcatggaagtaagaaaagaatccatttcatcaaaggttgaacattccacttcatccctgaattctctcttgctttgagttcttaggtacatctatattagatatcactttctcctctgcatccccaatgcccttttccctcctcagcatacctgatcctctgtccttgctgacctttgtatgtgtgtgttttctcccttgatgacatatccctcttcagctattgctctatttatattcagaatcccaggcaagcaacataaatagatgtctccaaggagtaagtgatttaattagcttgaagtattatatatattttcacacacacagacataaacatatatatgtatgtatgcatataaaacaaataagataaataactggaaaatatatgcaatgaagtcagtgaattagcagatgagataaacatcccagattggtatggtattgtacggtacggtgtggtatggtatggtttggtaccacaaggtctagtgtttagagctggctctgccagtcactatccctttgatactgatcaaatcatacaaaatcagtttcttcatccataataaagccttcccttgttactcagagttgctgttccagtcaaaaataaaatgttaatttatgatacagaccttgataagctgtatgaaccttacatgatactaatgtagtaagatgcaccacggttcattcagataagtgtcccagtgagtcctcagttttcacaaagtcatttcctatccccagttttgtttatttgtgcacctctgcatttacctagaacaagaattgttatattctaagtaattgccaagaagtatggtaacaaattcactactacttgattcttcagtggagaaaattatatacatatatatatatatatagatgcttgcctaaatgatatgccattcttccatacttttaaatactgtaacttgtgttattgaattaagccagccagtcaaaagcttgaaattaaacatagtattttcctatgaaatatattttttaacattataaaataaaatttggaataaaagcattatgtatatatatatatatatatatacatatatatatatactcataactcttcattcatttttgtgaatcagtctcattcgtagttttattgtacttccaaatcttcatttttctttggatcattttcctttgccagcattacgtgtgtgtatgtgtgtgtatgtgtgttttaaaagggccataagaggaaaacagcaagaagtctgtctcctaactttgaaacctaaattttagttttctttcacacaggaagtcatcttgtggatctaataatattatgaagttattctctttttgatggacatttaggaatgttttgatgtttcgtacaataattcaagttgcaagaaataagcacacacattttgcaagtacatctatgggatatgttctaaaaaattaaagtgcattctttgtcccttaacctatgatacgggcattctttattttgatagatgctgcagaattgtcttctaataagtcataggaatttacgttttcagttaaaatgtataacagttcttgttatataaaatgtataacagaaaggacttttgatttctatccatctgaatgatgaaaaatagtaagttatttattaaattattatttaccttcacatatgtatagtggaacactgagcatatgtttaaaagctacttgagtttttaaaatctgtaatctgtgctttactcattttctttattggctgttggttattttttactgatttttgatgcccctatcttgttaagaaaataatatttttataatatatcacatttatcacaagttactgtttatctttgagttttcttattgaattttgacatacacaaatggctcatatttactctttttatcagcagtgtctttgttagttcctggatttgggatatgcttagaaaagtttatcctaaacaaagacttgtgtacttttaatttattgtcatgtttaaatcgttgctaaatctggaatttattctggagtaagaagtgaagtagagttctaactttactttgattttgttttgttcttattgttgtttttcttccagatttgttatctagttgtataaaaaccaatgattaaaaaaaaaaagttttttcttgctgggcaaggtggcttacgactgtaatcccagcactttttgggaggccggggcaggtggatcacttgaggtcaggagttcaagacaagcctggccaataggtgaaaccccatctctactttaaaaaaaaaaaaaaaaaaaaaaaaaaaaattagccggcgtgacagcatgtgcctgtaatcccagctacttgggaggctgatgcaagagattcgtttgtacccagcatgcggaggttgcagtgagccgaaattatgccgctgcactccagcctgggggacagagcgagactccttttcaaaaaagagaaaaaggaaaaaaaaaacatttttccttaatgattttcactgtcaaaattattatttattaattaaatatgtgtgcattttacaagatgtcgagactttgtatcatttgtttgtctattcagacaccagcaccaaactgtgaattaatatagccttaacatatgctgaagcatttggtagaactagtcgccactcattaatctttttttcttttgaatactaaatttttatgtaaattttaatatcagcgtgccttgttccaaaggaaaccacaaaataataaagacaaagacaaatgaaagaactccccattatttgtatggcaaatgtgtgtacttatagaataatttggtgatttatatttgttatgtttataatatggatccttatccaaaacgtgcaaaagcccatttttatatgtaccttaataaagttttaagatttctttgtgatctatcaaatttattgttaatttaaaagcttgatagagctatactataaattgtatttccttaattatgttgcaatagtaaatgttgtttgtatatgatagctaagaatttttaaaattttaattttatattaagcatctaagatgaattattctagaagatgtaataatgatttttttctcctcttcaattttctatatagctaatcataccataattatcattataattttataattctgctccatccattttctggtgtgcatctgctatttcatcttttttgcctatggactacccttgcaaaatgttaaataatggtgataggagcctcaataatgaggcttttgctactttaacaacatacagtgttaaaatataactctcttgttccatgtgtatatttacatatctatccttttaaacttatgtaagttattttgcaatataatatatgccagtattagtttttttttttttttttttttgagatggagtctcgctctgttgcccaggctggagtgcagtggcatgatctccgctcactgcaagctccgcctcccgggttcatgccattctcctgcctcagcctcccgagtagctgggactacaggtacccgccaccgcgccagctaatttttttattttttttgtatttttagtagaaacggggtttcaccatggtctcgatctcctgaccttgtgatccgcccacctcggcctcccaaaggccagtattagttcttttgtgtcatttaaaaatattttgccagctgggcgtggtggctcatggctgtaatcgcagcactgtggtaggccgaggtgggcggattaccctctgaggtcaggagtttgagaccagcctggccaacatggtgaaaccccgtctctactttaaaaaaatgcaaaaattagctgtgcatagtggcacatgcctgtaatccaagctactcgtgaggctgaggcgggagaattgcttgaacctgggatggggaggttgcagtaagccaagatcgcgccactgcactccagcctgggcgacagagtgaaactccatctcaaaaaaaaaaaaagaaaaaattgcatatataaatttttaaaaatatgttatcgttttaattagaggagtcagagagaaataaaggtaattgtaaagaagaccctatatttacaaaataggacaatgaagaggatattagttggggacagaatgagtggaaagaacagatgttaaaatctatcttaattaagaagcacacttaaaggtccatttataacgctctcagtactcatttttaccctggccatatctttatcttgagtaactaatgaagtagaatacgacctatgcagttatgctaaagaagtttcgcgaattcctaatttcttttcagccaatgccatagaatggcttatatgtattataaatggttttcagagtagcagattttctaacacttaaatggacacaaaaagataacaaaccaaaaagagatagacagataaaacacttgaaccatttcatacaaaatttctctgagatttgtctactttttaatttatttgattacctatattaccattcctccatttacatgaacaaataaaagtttattgaaaagttcaccacatgttttaaaagcaactgaaaccaattttaatttctaagaagtaatgttattttcatgttcccaaatgatcacttcaaagaggcgagtaagaggcgagtaagaaggaatataagctctattgttaataaacctagacgtaccctaaatgaagaccaggagtgagtgaaggttggtaatttacttagtagagttgaggaacatctactctaggattctccacaggagttcagctcaaatgatcatttgaaaaatgctaaggatgcgaagagagagaaggcaccaaaaagaaggcaattggaaagcaatggaggtacagaaaaactcttttccctcatgtttgtataagagacaatagaactttgggttctcaccacaaaccttgttcattcagatgactacccatcttccagctgtctatgagacagatcacatattacctgaaaaaatcgtgtgaggagctctggagaaaggcatgtgataataagaagggtgaaactagtagagaaaattaaaacattaagggaaagtcagcatgctgaatggtaagattatccacttcgctgtacttcagaaacatggcagacattgaaaaatccttctcagggcaaatagatccaccttggagaaaagacatttaactgcagacatttggggatcttccacaaacatctaagtaactaactaacgtttacaaccatgaaaccgtgaagtggacacgattctcttcagtatcacagagtctctatttagctatttggtgcctcgccttaagccagaaacaagacttctaagtatctccaggcatttgaggaaaccttcagacatataaggagagacagtaactatacacagaaaaataaaaggaacttaacacatacacacacacacacacacacacacacacttaggcatgaggtcaaagcatcaaaggaagcaaagtgagagaagatttgatgtctttatgaaagcagaattttcttttttaacaaatattagaaatatgttgaaaaaaatggaggcaatctcccataaaatacaccagaaagataaaaggatggagtatatgaagcagtataaactcaaagcgtccaaaatcctagaattaagattcctggaagaataaaggaaaaaataaaatgatggtaaaaaattgccataaatataacagagaaaatattcccaagactgacagacatcagtctccagacataaaacataattgagaaattttatagaattggggtacatacggaagatccacaatggcttccagaaataaaaggtcatatacacgttatctggaattgtatcagaaacaccattctgaaaattcgaagtaactggatgaaatctttcaaaaagttgaagaaaaatagtttttaatcacattcctaaacaggtttgagaatgttttaaaactttcaatcatgtagtttttcaaaatgtgtgtgtatgtactttttctggtccaaggatatatttcatttaaacaggggtgtcaaccaagaaagaggaaggtatatgaaatagttgaagttgttgcctttgggaagcaaaatagacaaaaaagataatggttacagaactagggttggctttgtttttttgtttacgtttttaatcaaatttggcttttaaagttgtatatgtgattatgaaaaaaaaagtggctttaaatgttctaattcaaaagtaagttaattaaaaatatctaaaatcacaaatgataaagagcttccaaatttaaagcatttatgaagtgcacagattttaccagaaattcactcacaaatcttagcaatctcgatagtcatagaaatatttaatgtcttctcactaaatgtgttgtatatccttgctgttaaaagatcagttatccttatacttacataaatatgctacaaaagctaagaaaaacgggatgactagaaagatattcacaagaggccacattatcattaaaaattcactttagctgtgaggaaggatttaaggaaagagcctgttcttagtaggaggcctttgatgtagctgaataagtgtgtaactgatgtgagtggaacctttttaattgacactgacaatgaaagcaaatcttctgggctgctcatcagagtcagaggggatatgggaaattaaatattgtgttctagctttttctaaagcctataaagataatcaaacaagaggcatcttttaaaatctatttgtgagttgatgccattcatacggattaaaataaatagtacttgaatatatgtggttttggtttattttaagcgtcttttcaacaattttatgattttgtaaatggaatttacaactaagtaagtgaatgtgcaactacagaatttgtttaaaatctgatgaagtattatcagatatttacgctgatatgctagtttaaaaattctcatatgctagtttatatatttccctgaagaaaatatattaaagtgtgattcagatattatttcaactgctgatagaaccacaaagaaacacattacatattgcctttgaaagatacactggaaaatttatttttaaaacttcacttgtgttcacaaaaacaaaacttcttaaagcaatgtcatttccctcatttcactgtttcaataaacaatacatttactaactagttcattgcttctctgttaccagactatctctcaacaattatttcaaccattgcttttactttcctggttgaaaagaaatgcttttgctctttctctgcactactgtcaccagtcatattgcaggagtatggactccagccagaataaacctctgtgacatctgcagagacatgcggagaccagagcagactcacccaaacaatcacagataatcttcttccagctaaaaccacacactgagcttcagcaccagtcctgtcagagaagggattagtgggtgccttttgctgtttgcggtgtgaattacattcatctaatatgaggctggattgaatcctagccttatggtcctatgatgaaagaataataaaagattggtggcataaagaatctaacagttcctattctccgaattataattagttattactacagtttatagtttcttatggcaaattttgtgagatttgaggcatgtttaatgaataactctgattgcttttaaaaaggcaaccaaacaatgaaataaatatttttcccatttaagtcagttatttaaacatacttgattttgtagatgtagattcgatttcatcgtgtgacccagtgtacaacactgaatgatattaagcaaggtctcctgatgagaaattcttataatctcctataacttactcttatgtaaattcccttaaactatcccttcatcactgtatgccagatacgtgggaaaatctcccataggttaaaccttcaccttctctttgccttcaccctaacagaaaaaaagtttgctgaagaaagtcacacaaccaggttgactggttttactttaaaatcatgagcgtataactgccaccaaattgacactcagcattgtagggtatcttgctacctctccccagtaagatagggttcccactcttttagttggctgcttgccttatgtttcagtaaaaacaaaactataagagcgagccaccataatctctccacaacctaatttagaagtttgctagtacacatatctatagtctttgctttttacctctggatacaatggggaaaaaaattgtagcttctttttttaagtttaattgcacttcttgtgctccgaattccttactctcttagagtcttacagatttaatctattcgttacctttgttctttttcttcactgctcatctctcttctaaataatcattctcttcagaatatacagaatacaacatgctataatatttctcatcgaaagcaaacacataaataaaaaaagaaatgttaaaaaaaactttacaccataagggttttcagtttccctcattttttggctttctacctatcaaaacttcttgtaagagttttctatattggctatttttattttctgttatttcatctgcatgtattgttattgttttttccagtttatattttaatcaagaaataattcccagactttggtatatttctcatgccccatgacttatctgaacacattgttacggtataaatgcatgtgtctcatccaaatctctattgttgtaaccaaagacccaatttgataatattaagaggtagggactttagggagtgattatgtcatgaaggctccatctgccctcatgaatagtattaaaatcctaattttagggctcaagagaactagctaagcccttttgcccttctgccttttccaccatgtcaggatatagcattagtcccctctggaggccactgcattcaaagcatcatcttagaaccagagactgggttctccccagacattaaacctgcaggttccttgatcttggccttctcagcctccagaaatgtgagaaaataaatttccattcttatataaaatatacagcctccggtattttgttttagcagcacaaatggtctcatacacacattggcaatgtaatgaaactcagaaaaactctaggctctccactgagtctaagttccatttcattttggcttcctcacttcagctgcttttattgatgtcaccagttgccaaattcaacacagagcaatgtgctctcttttgtactttgaattatacaatactgtggaggattttcgcctataaaagtttttccatcttagcccaagtgttccacatgcttctcgttttctcccattcttgcttacttgttctcctcaaggtccttttctgttttctgccgtctacctgctgagtgtctaggtttaggctcctttcaatttctatttgctctcttactttaagtaccacctatatactgatgactattaagaatatatctctgaccctgatggctcccttaatcttttgggtcatatatccaactgcatgcttggcagttctactggattgtctaatgagaatctgaaacatactatgtccaaggagtaactctagacccctcccagtcactaccggccactctctacagccacttgatcaactttttatcttgccaacttctctgtctcagtaaacattatctctgtctacccagttgctcaaattaaaagcctggaataagagtctttatctttaatgatatatactaatatatttagagtaaacttatatgatgtctaagatttgccttgtaataattagggcaggggctataaaagaaacattcatcatgagttattaattgttgaagttggattatgagtaatataacatgcaaattctgattcaataggcccaacgtggggcctgagatgctgcacttcaaacaagctttgtgctttcagtacctcctacctcatccacaattcttatgttactatgctacttattttcttaatgggaatttcataatacttatctgcacttacttatctgttatccttgttaattttctgcctttctccctataagggcatgcattgtatatgtcttacttatcgccacatcagaccagctcagtgcttggagagtaggtgctttataaatatttataacaatgttatggagggcaatacaggaaataataacaggtgaacaataggtgtagatgttagtgcagtgccatgaaactgaattttgtaatcttggttgtgagattacaaatgatatttgagtttcactctcaaaattctggattaattggcttgaaatgttgccttttgcagagcttcccaggttaattctaatgtgccagcaaagttaagaaccactgccttagatcatgacgatgatgatgatgatggtgatgatgatgatgatgatgacaatgacgacaacaaacctaccatccactttgctctttgcttggagctatttcaagtactttatgtgcattaccttatattattcttataagaatcctatgaagtagatactgctatggttatgttagaactgaggaaattgagatgtagaaatggtatataatttccttaagatcaaccaatttatacatcatgaagccagcatttaaccactatttaaaccaaggcaatccgagtccatacccttagccattgacttaagatgatggcatacatgttacaagcactgggaaacaaaattgtgtgtatttttatttctaacatatcactcatctaaacaatgtgaaacacaatactcaaatatggcaaatgaaggagtaaactttcttgttttccctaaaatgacgactttgggactacttatacatttgctgaagcaaagtaatcattttaggtcccaaagctatcattttagagaaatcaagaaagcagagagacagagataaaaatacaaggaccatcatgaattatcaataactcaagaattactgtgcttggtttgaacaactagagcaacagacatgagccctgctcttcgcagagattgttctggtcttctctggctctcctttgcctgcatcccacaaggcacagtgtgtgtggggcctaggagacttgcctatcttgagcctgtgcctctacacacctcttttaaaccaatgctcttagtacccagaaccttgggattttctgcagaatgggtgcctctttcctgggtatgttttctcagtgaagagtaaaggtaattgtttgagaggagggtgaaattgtaatttggaccaattaactggggactaatttgtgtgtgtgtttcagaggcttatttggcatatgtatttgagggatgttatcagggaggaaattggggtacagactttggacatctacttgcattctcaccctaaaggtgcatctgcggtcaaattccaattccagagataaggtcaaggagttaatcttaagaaagtaaagggtaaatcttgaactgaagatgagactctagaaatactctgttatcttaggtatttgaccaatggcaacttcttccctattccattctcagactccttgaggaatttggcaataggtaacgctactcatgttaagttgctataagatagaaatggggcttccattgttcactcttcctgtgttaggagaaccaatattgcagtttgtcatcttgtggacattacattctcaccaaagaagcctcctttgcctcctccaactctgtttgacctagagattgacaaaggaatctgcttaggatcacttgggattcttctttctataggcatgtgggacgataatttgggtcacgtcctgagattttaaataaatttcaaaagtgcaatgaggagtcagctttgtaaaagaaaaaaaaagacacttccataacagaatttttttgtagctttcaaatttagctaagcatttgtttcctactgaataatcaacacttacagagcctgaagttataaatgtaagctgttttaaaattatgtacagactttctgcaattattttttctagaacaagaaagtgtattctctttccttttcaggtaacttaaaaagagctgaatatgttgaacttaatgtgctttatgagaatgctgacttcttaaatgaaaataaaaaatattaattttctgcttaggaaatgttgagaacaatcagtctcataatgattttgcattttaactgagcatatccctgtatactgcaaaaaatacactcaaattgcccatagctaccatgaaaggtaatgatgcagtacacttaattactgtttagcagtgcttttttatttgagtattttgaaatattagtaaaagcgttatatctcatatttttatgaaggacttcaataaaaatgtggtaatggagatcggttaaataagaatttcaaaactagaagtgattttttttctctaaaagtaactgatgtcgtctttttagaaaagagaagaacaaaattaccatggaaagcatttctggttttgtctcttcattattcttggcacaattaccaaagatgttttgaagatcttggccatcatagtaactgatcttatctttaaccatcataaaaaatttctggtgtattaaatgtaccaaaatattttaaaatattttttcagttatttgttttgcatttcccattactctacctatgtataccatgttgagaaacagggacaaattattctttgtttgtatcatttcttactgtatttacacataagtacatatgttactaacttcaaagaaaaaaaatatttcttgcttcttatgcacgttctttttttttttttttttttttttttttttttttgagacggagtctcgctgtcgcccaggctggagtgcagtggcgcaatctcggctcactgcaggctccgccccctggggttcacgccattctcctgcctcagcctcccgagtagctgggactacaggcgcccgccacctcgcccggctaattttttgtatttttagtagagacagggtttcaccgtgttagccaggatggtctcgatctcctgacctcgtgatccgcccgcctcggcctcccaaagtgctgggattacaggcgtgagccaccgcgcccggcctgcacgttcttatatactcacctcccacaatgactctgggcttgaccatgtttctttggcccatgagatatcagcgaacatgtcacaagcagagactcaatgcactttggcacattgggacatgcttttttaatcattgacctgagattgctacataggaaatatcaaatctattaggcttttgttcacaaatttgagaacaaatctataaggatcttattgaagaattgccatagtagagttacaatattaatcaaaaatatattaacttcttttttaaattggatgagaccatgtatcctagagaaagactactaactttagaattctgtctcctctttccagatatgagaccttggggaggtcatttaaactctttgtgcctgcttcttcatttgtaaaatggtgataataacagtacctaccttgtaaggtttttatggggaactaaatgagttaatattttacagtgcttaaaatattatagggggtacataaatataatagttgtcaaataaacagagaaggattagacatcggggttttatgaggacaagctctttgtaaaagttcaaagacctatatcagttacatagagagtaaagtaccagaaagaagagctaaagataagggcttataagattcattttattttgggaagaaatctcagggacagaagtaaaggactagagagacaaagaaggagggaaacacaaatacaatcgtatttttttactgctggtccgctgggcttgatcttgcctagggctctgtagactgcgacttagaaccatttgtcccagggaaaatcagaaggcagcgtttatccatgagctctcatccttccctgattaaggtttgcccccatatgataataacttctttggaacttgaatgttgttaataaaggagttgtggttgagtttcttcaggttgctgttttggtagcattaaagaaagcctattgaaaatatcaagatatttttctggaaagcttgagcaaggtattgtcaggttaaacctgttggaaacttatgacaaagtaatgcatgaaataaagggtagactgaaagaatatgaggcaagaactaagaagatgcaatgggggaacaagtagatgtcacctagacttccagacgtttgcatcttaacattgcagaagcaggtgcaatcgaacagaaaaacaagaaagaatagtgcatagaaaaaggaagatggtaacctacttgaagagatgaaaggaataaaataattttcatgataggcaggaagaagagtaattggggaaagcattgatttgctgaatgttttcctgtgctatttcatttttatctaatttttgatagagaagtttgcttgaaaacaaggtaatttctgaggttttctgaaaactatgtcaatgttcattaggctacaccaaacttactattaataaaattgcataattactttataaagtacatataattacttttcaggtagctccatctagcaatttaacaaataaaatagataagtaacatttaaaaattttgacaccaacctgaccatggagatgcatagaattctgtaaataggataattcacttaataagccagaggtgataatccaatctccatatcaggatctgcttaaacaaataaagttagcagtcctcattagtgctgtgaactgtacttagatgcttttagaacggtgctgccatgagttatgactaaccgagaaaaatgtattctatagccaaatgaaatcagaaaaattatttttaaaaaatatcaaaccatagatgaagaatttgaaacgactacataaaacctttgaaaattaactcccaatgtaacctatgagattatttttagttaaaaaatatgattttccccttcactgataattttctccaaaaatctctttcaaccttttgaaataccattatagctgtaaagccttctggcatagctggcattttcattgaactcattgattaatttagtatcatggaaacaatgtgaatctgtgtgaaatagctacagattgtgagagaagttggtgtactttattctgaaatgtaaaaataatatgctgcacaagcatgctgattttaaggaagccatcagtatcatagactgattaattctgtgttgctttgactgctaaaatgtgctcttccaatcaatttcaatccaattaataaaaattataaactggatttgaatatctatttaacattaggtcttccatgcagtttcacatactgtatatcacttcacaagcagtatggcatactggaaaggtcctcaaaatgggagtcaggtagctggtttttaacggcatttctgatgaaaatgatctggtggaaaatttgggatacctttctgcatttacgtattatttatttcataaaaaattcagctacatgattttaaataccccatacattctaaattgtaggatataatttaatatagattcactttttggtgtgacctaggtgaatctgatctttcaaattactagtttcaaactttacacttacacatttcccactgctaattggtaggaaattaacttggtatatttcttatttcttctgttttattagttttgtttttataattttgatttcctttgataaattctgaccatagacattttgagtaaaggcacaatatatcatttggacaatagtcttgttttcatttggatgttaactatcactatgaaagtggagatgccttttttggaagagttatcatatctagagtcagtatctctggcttttttatgtgttagcctcagcaaggtttttgatagcataataagtatcaatgaattaggttaattttttcatagagaatggaaaaatcttaccctcaacctgtttgttagctgtaatgtaaaagagtgtcactgattcgatattgagctttggctcatgctcagatggcttagacagatgggccatacaagactctgggcatccaaagtctcctgcggagaaaggaacaaaaaagaaatttctgaaattcactgagcatcttagaaaatacccaaagaaatatatcagaaagtaaaagtaaaataatgcaaaatgtggtacataaagtgaattgtgtgctcctcttcccagaaaaattagcaaagttaatgccattctaaacccaatcatattgttagaactttcgttgtacagaaattatttctgcttattgacatatgaagatcagtggagcacaagactcctagcttgaaacatttgatcaagcagtgaagatatccagcatatcataaaatgagaatcataaaaccatgctgaaggagtttgtgagtttagccttttctgagtcatcaaagacaaatacttattaatagaattgtatgttataatttattatatgaaatttcagattttattttgagctaccatatcctctgtaagtattaaatttattagtagttaaatatttgaaaataaaccaaaaggtatttgttctccatgtctttttgaatcaagtatcattgtgtaatcttatgtagagaaagagtactttgtaattgatcagtttattaataagcacaatgtttcttacaagagacagccaagactaatggttaaaaaaaaatgtacatacacacatactcctcagtgaagaaacagaattgggtttaaagttgggactatgccttttgtcttctgaaaggccttttgactccttgactgtgttagtcttttttcgatgtaattattacttcccctaccataatgtcatcacacttcagtagtttatttgcctgattgagcataataataattgagggcggtaaatgggatgatctggttcactattttatcatcagtgtttggagcaagccagaaacatagttggtcttcagtatatttggtgaatgaataagtccttatttgtatagtcactagactatacattgtcaatcaaagtggcgcagcatatacatgttaagctgaactcaacttttcactgatccaatttgtgctgcacccttccattgtatgaaatcaccatattccatttttttttctaccactaggtttccttccagctctaacatttcttaattctactgatataaattattcataactcctattgcttgtaatcttgttgctcttccagggctagaaaagtcctaaagggcttgcctagggattaaagttaattccctacagtattcccacctgtacagagccatggcatgggtagtgctgccccaggggaataatcttgggtttatcttggttttaaaactggtaactgaaaaaacaaaacaaaacaaaatgcaaagaatacccacacatcccaatcaagtgacatatatgaatgtttgtttataattcagctaagaatagttaattcacgtcatgcctcatgattaagtgcaaaccatttcaaaatatgaaacaaaacaaaagataatttaaagtccagccaagtaatctctcttgtacttgaatttggatgagatttatttgatcttctcacctaaattccatttataattagggatactcttgcttttctgctgtctcctcactggagaaccaaatggctggagattgactgattactgatcccttggggtttcagagaagctgctttctcataatatcagagttgaaatagttttcattccgttgcaaagatatatgttttaaaatgcttacagtaatgggttgttaactctatccttccctggatgaggtttctatagtaagctgtcattgtattacaactgttttaaaggatagataaagtaaaccaccttctaggtagtaaatggcaaacaatgtgtttccattattgaatttttattttcataagcatatcacatacaagtagtttaaaatcagatagtactaaaacaggcttataatgaaaaatagcagattactggcctcattccctgctggccttatccccaacaggacaacttgctgtcctgctccctgggtcaatagctttcactttcttagctgtttcttctggtgtttactcttatattcataaataaaatatatttactagtatttctgaataagtatattttatacatgtatttattttctatcctccaacacccaaactcccatgctcatccctcctcccctccatttgtcccattatagaatatatcaaaagtttgaattaaagcaatgttcaatgctcacattattttgggtacatagctactgtttaaaattaaatcacttggaatactgtaacttcacattatgttttatgttttatttgtatttgtattaatttatttttttgaaacagagtctagctctgtcgcccaggctggaggacagtggcatgatcttggctcactgaaacctctgcctcctgggctcaagtgattctcctacctcagcctcccgagtagctgggattacaggcgcctgccaccatgcctggctaattttggtgtttcagtagagacggggtttcaccatgttggagactggtcttgaactcctgatctcacgttatccacccaccttggcctcccaaagtgttgggattacaggcgtgagccaccgtgcctggtccacattctgtttcatataacttgttattgtctttattgtaaataattgcctcattttcatattggctatattttctctgtatcattagttcttttccaaaaattttagcagtatcatataatgcttcagagaatgatataattcatgaaatctgtaatctagcatgttatttcctctttgaaatagtgtgcccctcaaataccttgacattttcctttaaggttgtggtttgagatagagggaagactggactcaagttcttgtttgctttcaagaactcaccaagtgaagggagaatgcccctaaaatagagaagccaaagacactctcacccaaaacaaaccccaaatcacagtccccacccctaccctataaaaagcactcccaagtcaagcctcgtttaggaaaacagaatttgaggaaaacatctttgaagctgtaatttaccagcccttgatctttgaggaagatgagaagtgaataatgcccatgtgtttttcttactttccaagtgaggtctggggcttttgggctttaacttttctggatttaacttccagagcacctgcactggaggtcatagttagagcagaaactattcaacccaaaaccaccagagagaacaagagcagacattcaagatccttgtcagctgcctcctgccccaggtgactcacagaaacaagcttagaacagcctactccccttcagccctagaggtgtctcagtttatgtattcattattccctttcatttgtttcttctctacttcttccggatgggtagaccttggaagaggatgccagtcttcctagtactttctcattttggtaggacaaatggtcagtttcatgaagtaatatgtttactcttgctttcttatttcataaagagatgattccttgagacttagctcatgtgttcaaaaatagactggttgtgcccaaaccctactgcatagtagatgggacttaatatttccatcaggctgtgcaccttcttttccaccttgttctttggcatctatgtttctggctgttttattcctcattttggtggagaaatgaggcctcaacctcctgggctgaggcaggagcctccaccagcttcctaagaaagggtgcacccaggagacaaaattctgagacttgtatgtcaaagaattcctttagtttacctttcctctcgataaatctagacatttagggaaaaataatttttcttcaggatgctaaaggtatttattttacagttttctgtcatcttatttttaagatgacctattctgagttctgatttttttatatcatgtgtgtgcatgagtgtgtgtgtgtgtgtgtgtattctttatttgaattttctaaaagcttttggtatcttctcttgatatgttttagtttctttttattttttttttaatttttaacatttattttatattttttcttctcgggaatgcttttggccgggcatgaggtctcacgttggtaatcctcgcactttgagacgctgaggcaggaggatcccttgagcccaggagtttgagaccagcctgggcaacatggcaaaaccctgtttctacaaaaagaaatgcaaaaaattagctaggcatggtggtgcatgcctgtagttccagctacaagggagtatgaggtgggaggatcacctgagcccgggaggttgaggctgcagcgagccatgactgtgccactgtactccagcctgggtgacagagtgagattctatctttaaaaaaataatatttgtgggtatatagtaggtgtatatatttatggggtacatgagatattttgatgcaggggtacatgagatattttgatgcaggcatgcaatgtggataagcacatcatggggaatgggggatccatcccctcaggcatttatcctttgagttacaaacaacccaatcacactctgtaagttatttaaaaatgtacatttaggctattattgagtatagtcaccctattgtgctatcaaatagtaggtcttattcattcttcctattatttttttgtacctgttaaccatctctaactcctcaccagccccccactacccttttcagcatctggtaaccttccttctactctctatgtccatgggttcaattgttttgatttttagatctcacaaataagcaagaatgtgtgatgtttgtctttctgtgcctggcttgattgtagatcttgctgtggctcctttcaatctgttgtcagaagaagatgcagagacaagcatctagagaggaaagaaaagtcacatagcatacaggggatcctgacttcagaagaactggctttccaaacaaattaatagcacaagtgttgaaaggccaaaacaaaacaaaaaaactataaaatttctaagtttactcatcctatctgtggtgaaataacagtgtctttgtcacgtgattattatattcgcaaaaggcttgacttattttcagacatcaatatagcaaaaatcaggcacaacattatttttattatggagcaaattgtaggaaatagtcacacacacacacacacacacacacacacacaattttattccctatataaacctaaagaggactgtcctaaagaggacatctgtgttttagttttgcttcaaaactgaaaactgatgttcttaagttctggaaaattttattaatttttcttcttcttatctctaccattgtcttaattctttttgtaattcctagaattactttttcctactatcttttctatccttttttctgtctttgtctttttgttattctttctggaaattttcctcaaattttgtccaattcatatcaacttttatttttaattttaaattgtatagcttttattttaaaataagagctttttcttgtttgttttctttccctcctttttctatagcagctgttctatttttatacatgtaacatttttatcatccctgcattgtcttttctctgagccatatttctttttttcttttttcttttcttttttctttttttttttttttgagacagagtcttactctgtcactcaggctggagtgcagtggcaagatctcagctcactgcaagctctgccttccgggttctagcagttcttcctgcctcagtttgccgagtagctgggattacaggtccccactaccacgcccagctaaatttgtatttttagtagagacaggattccaccatgttggccaggctgatctcaaactcctgacctcaggtgatcctcccaccttggcctcccaaagtgctacgattacagatgtgagccatagagcccagccccgtatttctttagttttggtctctgcctttcatattgtattctggtctcaccctaaacttgcctaataatttttagtaattaaaaagtaatattttacttttagtaaatattccaaaagtaattgtgcaatattactttgttaatatttttaaatttacttctagtaattaaaaaagtaaatattttgctcttcgtaaatatgtaaatacaaaagtaaatattactttgtaaatatttgtaaatttacttttagtaattaaaaaagtaaatattttacttttagtaaatacacaaatagtacaaggcattagaaactaggtgccacattaactgggtgatcaaacttagtatcaccactaatggaacatatggacatgatggactgtaggatgagacccattgacgactgcaaagtgtcacaacataaaccgaatctaatcaggaggaaaaaatcagacaagttcagattgtggccaattctacaaagcaacctgcttaaactcttcaagtatgtcactcatgaaattaaaatatatgtatatatatacacactatatatatatattctttcatgtaataaaatacatatattttcatgaaataaaaatatatatttttttcatgaaataaaaatatatatattttttcatgaaataaatatatatataagtctagattgtggcaaattctacaaagcgactcacttaaactcttcaagtgtgctattcatgaaataaactaatatatattattatattattatacatattataatacgtattttagctgggtgtggtggctcgcgcctgtaatcccagcactttgggaggccgaggtgggcggatcaaggggtcaagagattgagaccatcctggccaacatggtgaaaccccatctctactaaaaatacaaaaattagccggacacggtggcacgtgcctgtagtcccagctactcaggaggctgaggcaggagaattgcttgaacctggcaggcagagattacagtgagccgagatcgcgccactgcactccagcctggcaacatagtgagactctgtctaaaaaatatatatattattatatatcgtaaatatatattatattatatatttagtatatatatttattatatattttatatatataaaataggctggggatgttttatagttaaaaggacatgacaagtaaatgtgatgcctgcttcttgattgatcctgggacgaagtggctgagaagcatgatctggggtgagtaaccaataaacaaagcagcctactgtgattctgttggaagaaagccttgctttttgtgctggagcatcgtcagcacttagatgatgtgagcttttctacaacccaaccatctgctttttatctttcaaaacatctctcctcatatcttacatactatagcctcccctgtgtgttttttgtgggtttatattattcttattatagttttatgagattgccagagggagaaataatttatgttcagtatgtcttattaaatggaagtcaaatatatttttaaggatgtaacttcttttctacagccccaactttgatcttatacattaagcataaatctaagctaattctaatttctagtcaaaggttcaaatgactatcaattcacttcaacaaaatacatacctgtggtatttggttttctgttcccgcattagtttgctacagatcatggcttccagctccatctatttccctgcaaagaacacggtttttgttgttgttgttgttgttgttgttggctaaatgattagaacccatggacacatacaggagaacaacacacactgggactttttggaggatagagggtagaaggaagagaggatcagaaaaaataatgaacgtgtactaggcttaatacctgggtaatgaaacaagctgtacaacaaaaccccatgaaacaagtttacataacaaacctgcacttgtacccccgaacttaaaataaaagttaaagaaaaaagaaattcataccaatttaattgcttttaataaattttggtgagtagtattaagaaatcatatgtatttacatgataatggttaaatgcttgtgtgcaggtatgttagaataacctagaatttagtactttggttaaggtccaccttggagattggtgtatgccttaagcttcaatttcccaacttttaaatgtcattaataataattataaatatttcatggtatttttgagaaataatacatgccaatgacttatgacattaataaattttatgatttctgtaatattatcttcataatgatcaatgatgtaatatcattgagaagtatcagaaagtagagatgtttcacaaacaaataaaaaatcaaacaaaacccaaaattggaatgtgcattataatgatgtaaaggataaagaaggatgaatcaaaattaattacaaataatcctctaaacgtttgaccaaatcagaattcatatttctccttcagataaaatttctctttttcggttgaaagcacagagaaagaaagtggaaatttcagatgttggagaaaatattcggaatttatgtgacactggataatactaaatgctcattctggtaactgcaaccttctttcaatattcctctttcctagtaaaaccctaagcatcacacaagaatatattttttcttctgcttttctccctgattttggaacagtttcttaacattcccacaaaaacatggtttgaggtaacgacactatcgactgaagaaggaatgagtttgggaagcgttgagatgtgggaaagactaattgtgccttcatataaagactcttagaaaatgacctcaggctagtatttccaatcatcttcaaatcttccgttgaaagaaagtgactgctgagtaatcatttgcactcagagttttgcaaaatatttgagatttagttaaagaaaaggggaaagaagaatccagtgctactgacaactgtggtacccagaccaatgacagcaaatgagtctgtgggatcatcttcacagcctccgaatgacagagcatcaatgaaatgaagaaaatagtgctttttgcgcttctattatcttctaactgataacgtgcatacattgttagtatttttccacagaatggtttatgtcaaatacttaggctaacagcatctgtactgagaagactctactcaggtgcttagaaatttttctactgaagtgtttttccagtgacaaagttctttcatattcttcccacctggaaacataatggcatattcacagttttcaccctgaaagtgtattaggtatgacataatagatgcctcattccagctaagagttgctaaataaataaatccacctggcagtgacatttatactagtttcgggaaatttttctttggcagtagagaccttgataatgcaacttaatgtggccatgatggtgtcttgcattgtgaggttaataggaccaatcagtggggatgaattatggttcacctttacaccattttatccctgctttgctgatatagacctgaaacagcctatctaattcctttgggaattctctaatggagcctccctaactcaagttactataggatgggtagatcctccactggagctgaaagcctcctgttgggtcctcatttgtttagtttgttatctctcgatacttgcttaattctctggaatgtcttcatagatgtggctggcaggcaatgccatttaatcattttttttttcctggttagccttatagaaaatgtttctttttttctggatggtgaatacataaaaatttattaaatataatcatttaaagatagggtaatttaaaagaggcataagcttaagcatatctgcatgtagcctccatattttgttcaaagatgtgtgtacattcagtgtaacataaatttaatatttgttgactaagaagcaaaaatatattgttaacaggtattctatgacacagttggccagtcagcaactagttttcttcagatcttttcaaaggctgcttgttgtcgctttatccaaaggagttgatagatgtgtatgaagcattctggctgacccatggcaatttgtgtttggaagaatgagatttagagccagggttagtacaccatgtggattgccatgggcattatttaggtgtagataagcttatctgaaattgcatctggattacctgactaatccaaaaaaggaaagaaaagtagagacctgctatggaaatagtcatgaaacaaaggagcgctaggggagaggtgggtaactaaatgctagtttttaaataatgttatatcagacttaaaagatacatggaagataagacaggcctaagagtttgctagcagctggatcagattgcaaggaagaatctcagtctatcctttattactcaagccagagcacaagactagtttccacattttataaatatagagtcttttttggagactgtgaaatttggatagaatgttttatttctcattactgtttacagattcgttatgaccttggcctgtatacactttcatgacaggttaagtgaacagaggttaaaggaggcaaactgagagtatttaaataaagtttacttgctatatttgtcttatctccccatgaataataaaaatatcatttattatatgtattacaaaatgttctaagtgctttatacacctaatattagtatggttatttcacacaaattttatgatgtctgatttctttttctttttatagatttggaggtacaagtacagttttgtttcatgcatatattgcataatggtgaagtgtgggcttttagtataaccattcccagaacagcgtacattgtacccactgggtaatttctcatctctcaccccctcccacctgtttgcatctccagtgtctatttttccactctcgatgatcatgtgtacacattattttgctaccactcataagtgagagcatgtggtatttgactttatatttttgagctagttcacctcaataatgatctccagttccatctgtgttgccacaaaagacattatttctttctttcttatggccgagtaatatttcatgatctatatacatatataccacattttctttatcgcatcatccactgatggacacataggtggattccatatctttgccattgtgaatagtgctgcggtaaacatatgagtgcaggtatcttttatagaaacttttatcacctctatttaacagctaaggaatctgaggctcagagctagtaagtggtgggtgtgggattcaaacccagggagtccaatgccagagtcttaactacttcaccagaagcagagggaaggggagccattttattattcttgatttcaaataagcggtagtttacagttagtactgcgtacacattacatgctcaacacataatagtgctaaatagttttttttgttgcatccctattcaggatgggggtaggtgagccctcctctcccagtattcctcatccttagaaataggcactaaatagttccagatcacagtttaaaactattgctatgggaaatgaattgaacaaatcatgtgcttaccttcagcactaatattctaaatcaccttagattaatgccagtaaataccaagacagttaaaaagtgcattcgatgtaaataactacaatgacaagttcacaaatagcaacacaactaggaattccacgtaggagcagaatataaagtaaaatgaaatgatgatctagatagacagatgatagatagatagatagatagatagatagatagatagatagatagaggagagagagagagagagagagagagagagattagatggacaggtatgtagtttcacctataagcaaaggcaaaaatgagtatctcagaaaggcagatttagggaccactaagattttaagttgcatcattctgtaaattggagattatcacttactgtactgtcacaaatttcagataagttaacattcccgaatgttcttggcacagcataaatgctcaatatcttcaattatcatactttttccccttcatccctgccctgacacatgatagatcatttcttaaaatatactacagcatgtattaaataatatttctactgctcagttttctggggaaaatagtgtttagttaatttctaggttttgttaagaatttacaaaatatatttcataaatgtgttcttttcctttcagaaataaatgtataattttactcacaacatttcaacaactttcctaacttgcatacttcatttttctagtgtttcataaaagttctaaatttaatcatatgatattttaaaataagatattaagcaagaaaacacagcatctattgtatttttaaacgaatcttatggtttttattttattatttcaattactgttactaaattattaattctaggttagaattataaagcattatcaaagatacagtagattgcaattagagtttacttgatttggcaattattaaaaaatgaacatttttttctgtgtcaacaatgaagtcagttaaaatgttttgtggaactaatatgctgatagcaatgctgcagaattaaaagtcgcattattattacacaaacattttgctaaagtttggaaattattcctttattggggttctgttagttttggagaatatttatatacatatatatatgtgtatatatatgtatataaatatcctgcaaaatgtagacctttcctcttagatcagtactagcatgctaaatattttattttttaaatatatattaggtaactgaaacaaagaaaaaaggtttttatttgcttagagagataacaataatacttaacttgtaaaatattcctttgatacattcataaataagaagataaattttctaattcttatctgagaagcatagcaatttactttttagaagcttatacattatggcatcctttgattaatgcagtacattttttctcacaatttataatggacttccaataatcttgcctttaaactgtatttgacctcccttattttactttccaactagaatgaagagatgggctactagttgtagttcactgtagaggctttatgctatctgaaaattttagacccagtggctttaataacattgtaaactgattctgggtccattttctcttgattgacatgtctacttccacatataatggtaaatgccttgacttttctgctccttgtgagtagattggtttgcagatttacataaatacatttcccggagaccacatttaccacatttgctcatgacagcaatgatccttggtcatttcacatgctgtagttacatgccattcaggaggctattgttgattgcctgtcatttctcctgcctagatgtcattcaaagggttatttgttattttaatttataggaatttgtacattaagttcaattaacctaacagggccacacaatgagtcaggttcaaatgaaagctgcagatattacttgtgaaagttaccatggaagatgatgaggaaggagtttttatgactgacctgtggagttagacttatttgtttttccaatgatctctactccttatgtttccaatagtttaagtgattttgaaatgaagtttttcataatatctggaaatacccacccctccaaatttatacccataccagtttacaatactttagacatgacagtatataagtaggaataatccattgttatacaagccccaaaagagaaagaacaaaatttgagggcagattggaatagttaagatattttatgtagaactatgtcaatattaattttgtataccaaaatttgacaggcttttatttatttatttatttttgacatggtcttgctctgttgtacaggctggagtgcagtggtgtgatcttgcttcactgcagcctcaaattcttgggctcaagcgattctcccacctcagcctccccggtagctgggacttcaggcacacgccaccacacctgactaatttttgcattttttgtggagagcgtttcaccatgttgcccaggatggtcttgaactcctgggctcaagtgatccgcctgccttagccttccaaagtgcagagtgcagggactataggtgtgagcacctatacccggccccaaacttttttttttttttttttttttagcatatcagtgtattagttcgttctcccactgctaatttgtaaaggaaagaagtttaattgactcacacttccacagggctaggaaggaatcagggaacttataatcatggtggaaagggaaacaagcatgtccttcttcacgtggtggcaagaagaagaatgagagcagagcgaagggggaagccccttataaaaccatcagatctcatgagaacttactatcatgcgaatagcgtggaggaaatccctgattacctcccactgggtccctcccacaacatgtggagattatgggtactacaattcaatatgagattcgggtggggacatagccaaacaacatcaaccggaatcttgtattgcaagtttttattgaattttaaatcatgaagctaaacacttctttgataaacatctagaaggtgagaagtagctcaactctggagtaaggctaaactgggtctgaatatgttttatattctctggactttgaaatatgtctcttgataataaactagttaggtctctctgtgaaaagtcaaccctgcttactctaaaaatatatatatatttatttggcctgtaaaagtttaaggcccaccagggcagggagaggctggaaatcaatatttttcttatgaatttaaaattttagaaaacctatttcttttttaaaatacttaatatttaataaaaaatatatggatttttattttcaatcctgtcataataacctatgtaggtagaattgccttgaactttctctttcctctgttaaatataaatgtttttactcatttgtttgctgagttattttttataacagaatacattttctttttcctttctttaagaacgttttgacaaataaacatatatatttgtggtatacaacattgtgttttaatatgtttacattgtagaatggataaataaagctaattgtcatatgcattacctcacataatttttggggggtaatgagaacactttcttagcaattttcaaatacacattttattaactataattaccatgatatacaatcaatctcttgaacttattcccattgtctaactgaaattttgtatctgttgagtaacatctcccccaaaccttgtcccttccctccagtctctggtatgcagcattctactttctaattctgttagtttgacacttttatgactccatttatacatgagatcatgctgtatttgtctttctgtgccggacttatttcacctaacatgatgatctccagcttcatcgatgtatttgcagatgacataatttacttctttttaagtctgaagattattccactgtgtatatataccacattttctccatctgtttatttgttgatggacacttaggttaattctaaaagttgcctgttttaaatatgctgatgaacatgggggtgcagatatagcttcaacatactgatgtcagtttctttgactatatacccagaagtgtgattgctgtaccatatggtagttctatttttaattttttatgactccatattgtttactgtaaaggctgtagtaatttatattcctattaacagtgtacagggctccccaccgcccttgccacattcttgcaactcttgttttcctcttaattttattatttctacttcagtttccttaactaagaagagaaataaatttgcttgttgcttattttgggatgatcccacaattattatactaattctgttagtataataattataacacttatggtgtctttctgggaaaactgaactaggtggttaactgcagttctgggaaagtctagaagaaaaagtccagttttggtaagagaaccctcttgcctttttaccttccctgggctaggtatggttcctgaggcaaacctccctccctccctccatccctgcctcctaccatagcgaaccaacaatttcctcagtctgaactgttccatcatgctatgagtgactcttaactattcatggaaacttctagaagtaaaatcccgaatttgtgcaatgagttaactggagaaagctattctagtaaaaaaaaaaaatatgaaaaaaaggaggctgggagacagcaaaacttctttgaattaccattttcttccctggtaggtattgttctcgactttgtttctgctatagtaaaatatatccaggtggagtaactagacaggcatgaggacttgatggaaaagaaagcatggatagtcatcacattcaagttgttttagttatctcttataagcaaaataattgagaagtaaggctgtcacataactagacagtgaaagttagtgagagaaggaacaggctgtgatctttggaaaggagatttctatttttgcagaactgctgagaatagtgagtaaaagtctgcataagacatactgagtgaaagtttggggttgttttctttaggcccatgacataactagctttgaatgataagttaacaatgtgaacatcatgtgtgcatagaatcagctttttaactattagttgttgattgtgctctgggaaaccttagtgggacactgaaaaatgagttaatgttaaataaggagttgcagaggctgacagccttggaacctttgggcacaggcatctgaataactttgcaggaatgacctgataattcttggattaataaggaaattctccctttacagaagatgacgtgcagattattaaaaactgagaatcttttttggaacctgtggcaaacccaaactcacccaatctatgtcataattttagtgacttggtattgtttgattgtaatgactaacaagcaaaccagaaagtcttccagaacacatttaagaagttacgaaaagggctatagatgaagaacaaaacagcactatttaaatttcattgcacacctaggactacaaaaaatactactttgtagttttcttgagtctatataactttcctaatgttttctatacattctccctgccgctcagctaacagctagaaatcactttgtagaataaaagggctgaggattgtatttatttccaagacagtagggcctacagaggctaaaaatcagcatctcatttttcagtcgatatggccagagactaggcaagtaacggagctggtggcagagaaaaaaataaaaaataaaaaataagtagattagggagaaatggaaaagaacaaaggcagctagggcaggtcaatgaacttgacagagaggaggcttctatgttccctcattttttccccggcataatattttgtgatttgacatttatttgataccccatcaatctgttccttggaacacttgtactgtagttgattttgtagagtagcacatgcttatttttcacatatataaattgtgtgttcaaagagtatctttatggtttactttctgattaataggctctgaggatattttgcttatcctggtgaataatttacatctgcctcgtgtgttttgcattttcctttggcttcattttcattccatgaaattttgcaagatgcgttctctcctttaagtggatgtgaatttctactcagtgaaaagcaatctagacaaaacagtgtaatttattagctatttttcttacaaatctcctacaacaaaactttattttatcactgccaagtaacatctccagtctgttttatgcaaaagaaatttcatatcctgattggtcacagtgtaaagttggtatttaagaaatatatttctcatatttatagctataatgtaaaaagcataaaatgtaaaatttgaaaatgtgttttattttcaactaagggcatgaaataaatataacttttataagtattatatgtagagatgaattttcctcagaagttgaaggtcttccataagtatgttcatatataatgatcttttatacaatttacattgcgcaactgtaccacttatattcttaatagatgagtgtgcgttcatttcatgctgttaatatctgcaataaaccttcaaattaccaactattttattgatactgtgttttgtagagcaccatcaacgtgtgaattcttaacctgtgcttcagctgttttctatgtatttgagctaaagtactatctacactttgcatgtcaatttttaagtctatatttttctcaatacaaaagagatcagagacaatctctcctgcttggttcagggaccagaaacacagtaggttctatccagagtcatcaatagccattgttctttttattgttctaaaataaaatgtaaaaccataaggatagcttaatcatgctacagacgaacttatgttacaaaagaaattatttacagtaacactctaattatatctacctgccaaaaaggaagtaagcaaataattataacacaaagtgataagtctttaagtacagtatactgtgagatattggaattgtttttgcagaatttgaaaaagttccttagatataactaggtttctatttattagcctatataaacacaaaaataagagaaataaatgtaagtggtaaaataattagacttggtgactacatcaaaaagttttacttaaaactttggcagatttaataataaatttcagtgaagtttttatagatatgaatcttccggttgaatttttgactttgaataacttaatcaaatgcggctctggattgcataattatagtttacacttgcataattgcatttttatacttttgccttatttgaagtattaaagtaattatttattatttgttacactatacattgaaattaatgacctagtcacacactcacttatatatatttgtatgtcttatggaagttattcatacaaaatgttgagattttaatgaattctaattgatactcaaacttgtcatattcactctatatgcatttcataatttttggtaagggtgtggctatagaggttagccaattcacatcaatttttaattatatactttttcaaaaactataatcttctcagtgttactaattatgaaattcataaaataatatccatgaaatgacttgggtgataatccagtaattatcaatagtcacttgctatcatattcggatgacataattataacttagactaacaaagtttgggtcatttgatgaatgggtggcttccttttattttattacaattatgagacttgttaataatgtatagaatttgtataatattaggtttaaatttcttttctgctgcgattttgttcgtttgtaataaaactatgaaacacactatttgagataatgtgaattcgccatttttatttttgatcagtttctaattaatacatttacttttggggggaaaagttgatcaataatgagctgaaatattgcctttagccctaataaagtatattttggaaaacaaatgttaccttaaaatgacaataacaacaacagcaacacaaaccttcacataataagagcccaaatgagatagtttaaatctagcttaagctctacttaataaacaacaataatgtataacactattggacaaaacaaaatattaaaaacctctccaaacataggtctagaacagagactagcactgtcttcactgggatagtcatgaatttccagtttcggtgtactgagattcagtcagaacttggacttaaaaaacaaagacactttgggaggccgaggcgggcggatcacgaggtcaggagatcgagaccatcccggctaaaacggcgaaaccccgtctctactaaaaatacaaaaaattagccgggcgtagtggcgggcgcctgtagtcccagctacttgggaggctgaggcaggagaatggcgtgaacccgggaggcggagcttgcagtgagccgagatcccgccactgcactccagcctgggcgacagagcgagactccgtctcaaaaaaaaaaaaaaaaaacaaagaacttggcctcttggttttagtgacttggaaataagaagatgaaaagatgaatattcactgaagaactctttctttctcactcttttctgcatcagtgttttacaagtagttgtggagtgagttatgctgaagcagatggggacgcagagaagccagtagcagatgggcacatccaggttaccctgcatggttgggccgcaaaccatggcctggggtggaatggagaaatctgtacacatccttttcacttgtgcgttttagcaggtgcagcatccgcagcaacatccttaatgctttctccccagttcaagcttagtttctcccttagactactgtaataacttcctaactgatttctccatctcatttttttcctcctccaatccaatttcaaattatcagtcagggtgatcattttgaagtgcaaatcaacttgccacaataagttatccattggtctgagaataaaaaccattctggagtaactacaaaggcctgcaggatctggaacctgaacgcctgtggagcctcatctttactgctcagccatcccttccttgcccctcccttctcctttgcatcactccagcccacttgccatgcttcttccctcctcgtccttctgctggagttggccttgggcttcaaagcctcccaaacttctctacttagctaatttttattcatccttcacatgtcaactcaaacttcatttcctttgagcagtcttcccctccgttccacattagttccggtcttctactgtagcgttcaggatgccctgtacattatcatatttgtaatgacatatttatcaatgattaggtgatatgtctttctaagtacagagttactggcctctgagcacagggcttggcacatgatcaaattttagccagcagagacttccctcaagatatttggaattggaagtaaaaaggaaatatatttcccatctggtgcacgaagctgacaaggataaatgcaaagttggagataagagaagtggagatgctctaatgagccttgttgttgtccctgaagctacctgcagccctgtcctgatggtaatttgggttgtaagtcaataagcatcctactttcatttttaagtttgttgacttgggtctctctcactggcaaggataacaaccctgactgaaagaatccttacattatgaaactgtaagttccataagggctagaatcttgcctgctttgctcagcaacgttgatacctaacaaaagtttgttaaatgaatgcatgttatgcaataataaattcattttaagttttctggtagatatagcctgtcatcacactttcatttgatgtgatctgaaaataaatttttctgagatatataagggccattgaatttaaagataactaatattacacgtaggtattatttctctctgaatttctagaattatacgtacagagagaacatgattaagaaaacaaatacgtaacaggtaagacaaattaaactggctagtgaattttttgatactcggaaaaatcagatttttagtttgtgtttgaagcaaatattcagaattatcaggacaggtttctacaaggattttaatctgattccttcaccaaaatcattttaacatttagctataagatatacaaatcatatttacacctactgtgttaaaaaaaagtttaacctttttaggacagaatggggccagtacaatcagacttatgtaagaaatcctcaaataaccttcttttgtcacgatgacaactgggagcaaataatatttaaagcatgagtgagtagttggaggagtatttgacagtttctgtgaggaaccattgactgaaaacagtgatcaacccactagatattttaaagtaaatttaaatgagcaaatcacaattcctgtcactgagaatgacagcactaattgtcaaagtgaggaccagaggttcagagctaagtggatgtttagttatatgctaatagaaaaatgcttcctaattaagatatgcttgaaagttctctctctgtctttcatctctatagcctatatttaaatctcctgactcttcataaatatgcagtggtgaccttaggacagggcactgtttagcaaatatcttttaaaatcagaatccacaaattctattttttaacaaaatgttgtattgcatcgtcctccttaggttttaaaaacatacatgcacatttaatgataaaccaatgattttaaaaggcatgtgaactgcttctcttcagacatggttgaggatttttgaacatgatgcaatatatttctttctaggacagttacagaactggacttttctttcttcctggtgtggtttattaaaacaataaatcaaagcacgtagaataaggagctgagatcttgagaggctgacatgcagaaaagctgagatattggcaaggcttaatcgttgaagcacccagtcaaagactcagtcagaagaggaggtggaggagaacagccaggaggacaaaggggtttcaggcttgggctgaacctggcatcacacagaggggactacacctcctcctctggggactaccttgagtcaacctcgcagaaccttttgtatcagagtaaggtatctgaaaaaccagagcagctgctctaatggttcagggctatcatccttagatctgaagggtcatggctacacatgcatagaatatggaaagcagccaggtgaaggcatcttccacaggctctcatcattctagtgtgtgtttttcaatgcatcatttatgtcagaagtgtttgaaaaaagctgttacaaagttagtccttattttcatagatcactttctaagtaaacatggtctaaattataggatgagagttttgatcaatagcatgcctgtattgggtgctaaaatagtgccttgggtacttgacggcagaggacatcagtaatgtgaagaaggctatagaaagaagcaacagtagacacagaataaaactgtgcttttctaattttgtctaaggttttcgttacaaagagtcaggacaacatgaataactttattatttccaggaataccaaaataattggtatttatacttaatttctagttgttttgtgtcttgtggaaaaagcatgatcagttaaatatggtgaagtaattaaaaatatggagataagtatagtgagaatcatcattacataatttggtaggtggtgtcatgctgttactactgtggttccatattgagcaaacattcaagtctcatgaaatgtacgattttaccaactcaaaatataaatatcttaagactggacacattaaattcactgttatagtgtattactgtttataatgtgagttacaatcttgtgcaatcattttggtgtgccacggctacgcaagctttgattgaggagagaactgtagagaaaaccaacatagacaacctcttccaggaaacttctgggatagtcatcaacgcagaaacttcatttgcctcctaatcatctactgccatttccccagaagctcagaaatgtgtgacttcacatggtcaatgaacattgaatatacagttgactcttgaacaacctggctatgaactgcacggttcactgtaatgtggatcttcttctacgtctgccaccactgagacagcaagaccaagccctcctctttccactcctgcccagtctacttaatgtgaagatgacaaggatgaagacctttatgatgatccactttcacttaatgaatataaaatatttttttcttattttcttaataatattttctttgttttagcttatgttattgtaataatgcagtacctcatacttataaaataaaaaaatgttaacagactattatcaacaaggcttctgaccaacagtaggctattagtagttaagttttgggagagtcaaaagttacattcagattttcaactgtatggggagtcagaaccacaatccccattttgttcaaaggtcaaccgtatctggaaaaaagtcacacaaatcttctaaaatagatgaataaaaagttgaaccatattaattgcttcaagcaaaattaaccattaaaaataagcaattcattgcactttatagagactattaacagaatactttaataaaaataggactttttttccttgagttaaggatgatttagtaaaataaactggttgcaaaaaatgtacacaacaagcagcacttatacattctttagcacagaagggactgcctcagagacctctttaaattcttaaggcaaatttaaaatcttggcaatttcctcgaaggtgaacaactaatagtcctttgtagggacatggatgaagctggaaaccatcattctcagcaaactgtcgccaaggacaaaaaaccaaacactgcatgttctcactcataggtggcaattgaacaatgagaacacttggatacaggaaggggaacatcacacaccagggcctgtcatggggtggggggaggggggagggatagcattaggagatatacctaatgtaaatgacgagttaatgggtgcagcacaccaacatggcacatgaatacatatgtaacaaacctgcacgttgtgcacatgtaccctagaacttcaagtataataaaaaataaatattaggtaaaaactacttaataagcatggaagcatctatgtagatatttgaaataatacacagatattaaaaaaaaaagaatcaagaaaagagagggtccttgcactcatgtgggcctggaatcaaatccacaccgaattcacatgccttcattggtcactttagcttcagaacccagccttctcatctggagaatagacacaatgatgactatatatataataatctcatctaatccttgcaacgatcctacaacttagaatatggtaggtgtttaatttatttttgtattttactctatattttcttacccatgataaataaattatgttgtgcatcacaactctacttggggaatgtaaataaattccatgaagtcattcaagacgtcattttaattttgagtcagtgtttcttctccagaaaaatcaatacagtattaaatatctaaaggtataagtcattttgcgaggctaataagatgacaccttttataatttatgatttaaaaaccattgcttaaaacaaatcacttgaaatcacctaaaaactagccaatcgcttaaaaagaaaacaaattttaaatagagttttagtagcaattaagtaattttttagttttaaagatacattagaaatgtttattagttggaaatgtttatccatatagcacaggatgaataagtgattacataattcaagaagtaaagcagaaaacattcaaccaattagaatttttgaacatcttgtcctttaaatatcagatatgtcaatatgataaataaatgatatctaaaacatctatcacaaaaactgggtcatgatgagaatatttatatgttaaatttgttagcttttctaattttctcaccttcccaagggtaaaatcatgcttatattcaagattaatcactgcatcctcctccccaaaggctttctacccttccactaagattttttattcctaatacaaagccaaaaacctttacaaaaaccactcttcgaaaaccacctgggtcagggtgatagagaagaaatagtaatgcaccagaaattacagttccaaattctttacatccttgacatttaccacttcaaggtctcagtagtatgaaagcagggcagtggggtggatgcaatgactttcaaggtccttctgacttggtctttctgtgtgtcgcctgtgctctgtaatgattacttagaacaccccttaagtgagaaagttggggctggacagaacctaacaatcaaggacctggtatatttgcagtaaagtatctattccaactcctctcactgttctctcttgtctctactctggactttcccgtatttattttgatgctaatattcggagtgatgttgatgtctcatcacgaatgccattccctagagcaagcttgggcaaatgactgcctgtgagctaaattctttcaaccttttatttttgtaaataaagttttattggaacccagccatacccaattgtgtacccttgtctctggctgctttcatgctacatgggaaaaactgagtagttatgacagaacctctatggccacaaagtttaaaatatttactatcttgctatttacagaaaatatttgctgacttctgccctacagaaacataagcaaacagcagtaatcactaatatcaattaaatggatattattggaactcttaaggggcactttatctatagatatcatttttttgacttttattttaaattcagggggagacgtgcaggcttgttatataggtaaacttgtgtcatgggagtttgttgtacagactatttcatcacctaggtattaagcctggtaacagttatttttcctgatcctgtctttccttctaccctctaccctctgatagacttgagtgtgtgttggacccttctatgtgcccatgtattctcataagatactaatttttatctttgtgaaattttgtttccttgaccaacatctccccaatccctccactccccagctccaaaaaaccaccattctagcctctgcttctctgagttcaactttttccgattccatagataagtgagatagtgtggtgtttgtctttctgtgcctggcttacttcacacaacataatgtccttcaggtttatccacgtgtttgcaaatgacaggatttccttcttttaaggctgaagactattccatggtataaataccaaattctctttctccattcatctgctgaaagacacttagggtgattctatatctaggctattgtgaaaaatgcaatgaacctggaaataagttcaagacatttattatacatcacagtgactatagttaataacaatatactatatacttgaaaactgtgaatagagtagatttttttttttttttttgagatggagtcttgctccgttgcccaggctgcagtgcagaggcacgatcttggctcactacaacttctgcctcccgggttcaagcgattctcctgcttcagcctcctgagtagctgggattacaggcatgcagccaccactcctgactaatttttgtgtttttagtagagacggggtttcaccatgttggtcaggttggtctcgaactcctgaccttgtgatctgccagcctcggcctcccaaagagctgggattacaggtgagagcccctgtgcccggctaatagagtagattttaaatgttctcaccacaagaaaatatggtaagaaggtgaggtaatgttaattaacatttgttaattaacttgatgtagccattccacagtctacacatatatcaaaacatcatattgtacgccataaatatgtataattttatcaggcatttaaaaattattaatttttattaaaacggttataatagttccaaccgtgttgtgtgtagattcacaaccattagaagttacaaattgccacatataaagggtggtataatataaagtcagttttaaagagattggcatggcattttgtactgtatttgaaacatgatcaacattgttatttttattttattttattttatttatttacttatttatttatttatttattttatttgagatagagtctctctctgttgcccaggatggagtgcaatggcatgatctcagctcactacaacatccgcctccctggttcaagtgattctcctgcctcaacctcccgagtagctgggattagaggcatgcattaccacaccctgctactctattttgagtagggatgaggtttcaccatgttgatcaggctggtcttgatctcttgacctccagtgatccactcaccttggcctcccaaagtgctgggattacaggagtgagccaccgcgcccggccaacattgttattttgaaatgtttgtatgagaatagaacaaagcagccaccttccccctggagccctgcaggtcggctcctgttaaccaggagccagggacgtggccaaacaagtaacaaagtcactacacgcttcacagccgcaatgctcttatctgtaaatcagacaaaatgcttgtgtataaatgtctgcaaagatgtttccaataaaagaaagatttggtttgtggatgtgctttgttattcttcttattaatttggggctagagacaagagaagagtctcagggaaagaaattccttgtttgaattaatttagtcaaatcaggtcagagaatccagaacaagacttagctgatgtttcttcagggcacatatgtgactgcctttccactgtgaataatatctactcaggccatgtattcattctaccacttgtgagatttatgtagcattcttgcctccatagtgctaaagatgcctggtagggaagtttaaagttactgcagcaatttcttttcggtgcatattaaagttgtggtgccttatctatgaggcggagctgtaagtcgctgtgatatcttgcttcgaattaattcactagttacattcaacggacatagaagtagagtttggcagtttagaaagctggcaaattttctgtggctcctcaaacattactgtaaaatttgaaagctttaatatgaagggtttcagtttagtcacagagtaaacctaaaatcctgggatgactgcttcccttttatctgtgcctcatgaaaatggatacatttttttatacctcatcagatagacttttaaattccaatcgtatgaaaatgaagacccccctcagttagagtagaccacaaaatgtggctgattgtcggtgaatcaggctattacagttacacaaactgcgttgcagagcaaaaaacaaaacaattgttactgtaagtaatgaaaaagcagcaaaatgcagccacataatggtaaagacatgagacttctctagtattttaaatgaaaaagcacttgactagctgagcttggtgcttaacacatgagaaagatgcaggaaagaaaatgatcaaaaggcatggtccagcctcatgagagaagagggtctgcatgtcgtgagggccactttctcaatcctgtttggatcttatttcacggcttcaggttggaccttccacttgcaacttgctgtggaggtgctcttctgcaagtcccaagatcccaaaaaggaaatacaggagtttcggtgtttttgagcaaaacaaagtaaaaagctgagtaaggaaacactatacatagctggaaataggttattttctatttgcagacaaagaacaatataaacaaagctcgagatcatctgggcaggttgaaaatagcttcagtctcaaaacagttacacatctgatctgatttcatcacattttaatttttcttcctctgcctcatcttcctcgttctccttttcttccttttacttgttcttcttcttccttatctctctcttcctgtttctctctttctcctgctcctccttctcatacttttctgcatttgtactgcatgtgagatttcaactactcaaatgaattacactcataattttcccgagtggggcagagagaagggggactttcaaaataagcctttaaaaggaaagcactttttacctatatttttcttttcttttttttcttttttaaaagttgagcttataagatcatgcctggtgaagctgtgttcatccactcctctcagcattagtggaagaattagagtattaacgaccttatagaccaggtattttgtagcctcctttacagtttgtcaagttgttaaaaattgatacaagaaaacttaattatttcttcagagaaaagctggacatgtgaactatgttaaccataaaacttgcctgtcttatgtttctataaacagccaggtttgaagcacaagggcaaacctatgcatctatgtgtatatacacacgtttctattttatatgcatatatttacatgcatgtatagtttttgtaaatttattcgtgattcttagtggttatcaactaaatatgaagcagtgttctagctgcttaaagagttggaagaaaagggtggtgtcaactctgcgattttgctgatcaaatcgagattacagatacatgttttgcttagcccacataggattgttttaaattacattttgctgtgtttctgcttttagaagttgagaagtgccccatgagtatccagagcttgtagcttctcttgagaaatctgaaggtcttgcaagactagacctgctgccttccccagcagcagccgtcatctggaaggtgatagttgctaataccctgagtcaggggagactatttctccatagtcctggcagctgcctactgtgttatccctgagcttcactcatttgttttctggcctgatcctattgttatttcgagttcctactcctatagatctataaggggtgactgaaggggtttggaaaaagactaggttgggggtcagttgtggggtattgtggcaaaaatgctgggtttggaagtaggtggtctctctgatgagcttgcttatgcctggtatgcacccatgatgttttccacaacaaaaactagaaaacacttgccaagtatctgggagtggaataacaggcttgagagaaaggtccccttttggcatagaggcgtgcatttaaaagcctttattctgctgctaaatactatttgaaagagaataaaataagtacagtctcttttggggggaatagggtggaaaaaaaggagtgttatttgcaaatatttcaaagtattctataatgactaatacttgtaaaaagtaacttaggaagccttggcagcgaagggcagaatgccatcggttaatattccaagttttgtgtgcctagtgaagcaagttagcttgtaacagtgcttcaactggaaaaatcacaattgacagcttcaattcataaggagcaaagcaccacagtccatgaagaaagtaactgccatggtgagcactctgcatcagggagaaacacacacacacataccacaccacacacacatacacacacacatacacacaatgatcaccttcctggaggaagaagagtagtgaattttaaaatgaatactttttatttgtgtttttctgttattgccaactttaaaatgtactcgttttgattaagctaggttgtgttacaatattaggaattaatttcaaacacattgtgtttttacttcaaaataatttacttcaaaaaaatctttatgtgtatttacaaaaatagtacagctagtaaaatgacactgtattggcttttattgccaaaagaaaaattaagtgtaatgcttaatgaactctttgaaaattttaactgttagcataatgcaactcattctgatttccattagatgtatctattatatttgacccacatagtttaagaaacctgtaattaagacactccacttttgaatcataggaaaatctctacatcttatcttccttataagtttaaaaaaatttaaaaaaaatttgcaaccaatcaaagtcatgctattccttattttaatgccagttttcctggtattttcgataaatttaaaaaattacaagtgatatttatatatgtaaaatgagggaaaattctacaactataaaatcaaattgttttcatttcttaggaagtcaatataaatggtctttcagttgataacaatgtctgttcattcacatcaataaataatttcataattccaaggctctctttatccaattgtattttaaagagtacacattttgtgatagtttataaattaaaggatatatattcaaagtcacataaaaaatatttgagttaattacaaagtaatcatggaagaatattccttacatttctatttattattgcatgaaaatggataatttcataactttttatatataagattccaactggcctttatttcattacatataaaatgaaaaaagatgagttgatctgacagcacagcccaagttttcaaaatttgttaatgttattgtattgtcaacactaaatgttaaatatatatacacacatatatatacatatatacctatatatatacctatatatataatataaaatgctaagaatataaatgttaaggacgtacatccacattttgacctgctccatttccgacctgggtcagtttgcctctcgtttgcaaccacattacacacagctcctgagaggtcaccacattgatgccaaatagtgcagacatgtgatcagcatggcacattataaccaggagctcccaggcccaagcaatccttctctcagcctcctgagtagctgcaactagaggggcttgccaccacacctggcacatgcacattttatttctaatttaattttttaaaaatatgcagcttattatctaaagaaagacctttctaacccttccatttaaagccataaaatcatacagaggcaaaaggacttcttggagctctgtggttttcctctggtggctaattgtggttaactctgcttatcagagttcttttatctggaaatgactatctttctagtgcatttcaagtatcatctactttaagttctgatcacatttcatttaccacttatatttggtgtgaatgcaaagatgaatcaattacccaatttcgccatctttttaaaatgcatagcatctatgcactaaaaatacaatacaataatgtgcaactcaaaaaattccccaagcaagaagactgatgatttcttaaatattatgtgaccttctatcgcctgattttagaaattctaagtgaggacaacttggattgtatcctaaaatattatgctgtggactcactctccatgtatacaataggtttgacatttgatagaaattaggggacagcagaagagaaagaattcttaactatgtctgtacatagttaactaccctaaggcactttaattcttgtccatcctttattctagtaaaactgtcactgaaccaaaagatatatctgtataaagagctctgtactgtcaaaagtaaagctacttggcaaagcttatgagactttatgtcagttttctacttgaattatagttatttcactaactagttatctttttcacatctattgtgactagagaatgagatgtagcagcaatctttgttgcatgccatttgtaaactaaatttatgtcatagatttgcatgctaagtacctctctggtaagaagagctctcaaaggcagcatgtttatgccactatttgtgattaaattggaattctaaagcagacccaagttaaacatgaagacaactttagatcttggtctgaagtcaaatatagactgtttacttaccattggagttatcttcttcttcttctttttttgtggctattagcaagataatctgtgatagtttttaatcatctctcttttactaacttcatagttttaaaattttctgtgtttttggtgttggcataaaaggtatgtgttcaaaattcatgattggctaaaataataagatctggagtttgaaagtagtttcaacaggtgatttagtatataaaattatatatacttacatatactatgtagttattaattaggtaccaggctattgtcatcacataaatcataaacatcttcaccagaaagttttcacttattcattcatttaacatatatatgttgagtgtgtatgaggcaccaaatgccacactaggctgtcaggtgccatggtttaccagatacactgttcttgaagtgcttaccttccagttgggggatataaaaaaggcacaaacaagagaatgagttagagaaacagaccatgtgaaatcacacaaacacatggacagctggattgaccatttggtcccatttttcactgtcatttaacttcttagtcttcctcatctgtgaaagagaagaagaagatgtgacttacctgttttaaatggtgatgaaactcatcacagttttcagctaggggccaaagccctgagttctgtgtgcgtgaatggtctcagcctggagttctctctagttgctctgacttgcataactctgtttcactcggccacaaattaagtgtcagggcacatcccagcacctacttgacctcccttaaataaccccagtgaggatctctaagataatttttaaattatgaaattaaatgattaatatttttaaatagaaaaggtagaaaaatgaataaaagatgaaatctctctgtacttcttttgcaaagtttccccagagggaattactatcaactgttggctttacctttttctatatattttctaaatagtttttaaaagagaaaatacaaagttctgcaactttttggctggttaattttcttaaattggtacataatgcgtatttattttctcattattaactactcaaatactctaaaatatatacagggaaatccttctttggtacattctttctctcacctgtaaccccaggaaaccaatgttatataaaatactatcatatcctctgcaaaatattgttatgatttgaattgtgtcctcctgaaagaagttgaagtacaaagtctttacaaatgatcaatttgagatgaggtcattagggttaatcctaatgacacagaggctgacatgcacagaaggaagacgaagtgaagacagggacaagatggccatctacaagccaagcaaggcctataactaccagacattagaagagaggcatagaaatattctccttcactgtagtcaaaggaaccagccttgttgacgccttaattttgcacttctagccttttgtatttgtccattttcacactgctgataaagtcatacctgagattggggtatgcctttatttttctataaagaaaatgatttttttataaagaaaaagaggttcggtggactcagggttccacatggctaggaaggcctcacaatcatggtagaaggtgaaagtcacatcttacatgccagcaaacaagagctaatgaaagctaaacaaaaggagaaacctcttataaatccatcagatcttctaagacttattaactaccatgagaacagtatgggggaaactgccctcatcattcaattatctcccaccaggtccctcccacaacacttgggaattatgggagctacaatttcaagatgagatttgggtggggacacagccaaaccatatcacctttggaatgtaggacaataaatttttcttgtgtaagccacccagtttgtggtacttctttatggaagcctgagggaactaacaaagatttcatacctatgtggattggccattttaattccaattattatcagagaacaataaaagtgaccagaaatatcttctttttatattctttaattaaaaaaattcaatagtaaatgggcaagagttgaatagacatttttcaaaagaagacctacaaatggcaaagatatgaaaaggtgcttaacaacattcttcatcagaaaaatgcaaatcaaaattaaaaacaggtatcatctcacccctgttaatacggcttctatccaaaagacacaaatattgcagtgtttacattcctgccaccaggttgcccacagttattttgaacactgaacttctttgaaagatgactgaagtctacatattttatgcccctaactactatggtatctctggaaatctgaatgtaaacattgtcatggtattgtcaaaacattagatggatttaagaaaataatatagagaactttttataccctgtatacagataaggcctgcaaaagtctttccatataaaaaaaggaaatactttattgacagaactgttttccctttgggccaccctctaggaagagaagaaacggagctctgttgaataactttttcagagattcctgtagcccagaggcatctgagaaatatttgtagacatggagaaaaggaaaatgaagcagttgtcagtactttactccatgtgctgattttaacttacacaggtaactttgaattggttaaaaaacccaggcaatttgactagagctcatctattggaatctcaccttcaagcttgagagtcttgaataaacttattctttgacttaaaatgacctgatttctttttgcaagggtttctgttaatgaacaaagtctctgtctcccccgtcactgcctgatctaaaatatcttattccttgagtcttgcccatatttaccagatcattggagacaggtgcaatagtgaattcgcatttttaacatttttcaatctaagttttaagattctattattgagatgaaaatatttctaataagttttctggcaatattaatgtgtgggcaataaactaggtatggcagtacacctgcaagaagacagttagatatggtctttgttgtccactgtctcaccccaaactaaagtcttctctacaacagtccttgtaggtgggtgtctatttttccattaaatgtttgtattgatagagagatgctaaagctgtctgattcattttactgaggcttgaaaagtatgtaatgtattcatgatattacaataattccattgagttatataagacacatcattaatgtaggaattgtaacattttcattgtttcattattgatcaagtgatgttagtagcaatttgtaggcactcagatctatctttggggattaatgaatgaagaaagaaacaaaagttatgcaagctttcacattggactgttcagaatgccctgatagtcacattttagctgtttatgataacatatccactttactatgcaaagattttcggcatttatatgagggatttattaggaaaaatgaactttgaagtgaaaggacaatcacaggtatagagtgaaaaaaggtatgatgtcaagaagagtacaactgagctaaaaatttgtgagtttatagaaatactgtaagatttgtcatctgttacatctcctcttaaaatgatgaaaccatataatggaatttattttgaaattgaccatatttctctcttaacaagtatgtataccatggtattgacatagaattagattgaactattactatagcatcaagttggctatcaattgttttatttaaatgcatacagaaataatgaagcataatgctagttgtgaaaaacataaacaaatgtccctggctcttgcttaactaacttctaatctattactagttataatgattagttagaataatattaatgtgtatatacacagaaggttttatggaaaatgtgattgatttcaaattaaaattgagttttacaacaggtagaaaatgcaggtgcaaatgtaattcagaaaataatcttttaaatgtttaaatagtcattgaactattagacatctacatattttttcatttaaagttaatgatctaaatatttataattatcaattaataagcagttttcagaatattgccaatatctagatgtattaaaagtcaaatccacatttattacaatatagatgaaagtgaatatgctagaaccatagaagatatcatagacatatataagataacatatactgagtcttctttctactccagggacttaggctctttcacagaagtaactaaatcattaattacctttgtatcttacaaatttcccaattatatactcatatacatgaatttatatataaacaaatatagacagattttttttacacattggacttttctatatattatagatgcttgtttcactgaagagtacaactttaagatctttttatattagcacacagaagtctactgcattctattcaacaaaagtgataccagtgcatcatttccatatgggtaatttttttttagtattttcacatcaactgtattatttattattttttaaaattaattcttatctcaatagcttttgggatacaaatgtttttttttacatgcatgaattatatggttgtgaattctgagattttagtgcacctgtcacctgagtagtgtacattgtacctatggaggttactttatatgatgtttattacagaaaacattgcaataaatattcttatacatgtatcttcttattcttatgtaagaatacatatataagaatatatacataagaatatatatacatatatgtatgtgtatatatatgtatatatatatatgttagccatttaagtcataattctgtgtgtggtctttattttctaccttcaaataagttacttatgctattttgtcatttccatagctgaaaaaaattccatgtgttatctggaagaccactttttttttcccacttgacatttttcatctctatttgaaaaactctctatcaaatgctcaaagcatgacaatttgtaagagtaaattgccttatagcacacaacacaaaatatccactaataccaatgctgttttatttttatatttttaaattaactaatttattgattttggtagagacaaggtctttctacattgcccaggctggttttgaactcctggggctcaagcaatctgcctgccttggaatcctaaagtgctggaattgctgacctgaaccatcacaaggctcacaaatgcttaatttttaaagtagtgatagtctgcccattcaaaagagaagctagtttacttatactttagcaaaaaattaattaaaatatgccttattggagatatatgtagtgcatcataagataaaagggatgaaatataaatcaaagtcaagattaagacattttctgtcttcagctctctgtattttctgtgaagaaaatactgttacagcactactaaaattattttctggcctcttgcaaaatgtacctaatgctagttatttaattattgtagttagccaccttttcatatggattctctattctcattttattttacattcctttctttccagtctttttacctcttgtgcaacttttcttattatggttccaattttcatttctttatttgttctctcttgggaaggaagaatagtcatatgtaaaataacatattgaactttctgtcttttaagtatttagtgtgtattataattacagtagcgatcaattctatgagtagatttttttgtttccttagctgttttgttcatatttatttttctgaaaatgaatattacagttcttcccctcaagaattttatgattgatggatataacattatcattaattggagaaaaaagtgcagataaaagccatggaagaaaatgtcagaagttttagaagtgtgtatgcaaggaaaaaagggttagagagatgaatgattgattcctactcttccatcttgagtacctcatggataaagacaggatatttgtgctccaatttttagcagccacctgcttttctgctccccaaaggggaaaactagtgacagtaacatatgagaggaatgtccagaagccttgtccaaatgctctgcgtcatgcagattggcctctttgtgtctccaagtgagtcttctaggcatggtattcctttacacttagcatttattttgctcagcagcacttaaattcataaaaacagttatagcaaacatttctagaatatatcagaaggtagatcttttcttttttaattttcaggaaaaattatacaatataagaagataggctttagtcagataaatcttaaattcagataataaggctatgaaatgtatcacgttactcaatttctgtgatgtctctgagctttttgtcataggcgtgctggagagatgaagtgaccctcctcagttaattcttttgagtattaaatgagataatatgtctgaatcactcaaaatatttagtaactgttagtttttttcataatatcctcaaggagaacttgggggaaatttcataatgctcccaatttatggtggtaaaatgaagacattcaatgtgaaaattaatctaaaatgatggaacagctgtactcagtgggattcatctgcctcgaattctcaataaagttgaattgaactatgcttttgagatcttcaaactccccctggcccattttctgtaattcactaaaactcacaggattcggcacatagccaaactaacggctatgattgattacagcaaaaggatacaaagcaagatcagcaaagggaaaagccacatccagagaaaactcagtgcaaccttccaagaagcttcttctactggagtcagacgggacacacttaattcctccagcaatgagttgtgacaacgtgtacgaaatgtctactaggaaatcttgcccaagattagaagtttaggatttttatcatggttcagcaaacgccttctgtcaaatatatgccacatttctagtctttcagtaggaaagccaggtattcagtataaattatttagtttttacaaacagtttaagcacaatggactcctattatcatttagagaaagttttatatccgtgtagggaactatttacccttcaagttactgaatgccagtcaagcgctaactttgcaagccgtccattctaagaataacagtctcaagcttactatgttaatttgtttttgcatagatttcatctaaaaacagcagaaaagagattaagggaagggctcagagagagtagagccaacatgaacagcaaatctgttatttaagtactagttctaccctatgtagtcattaaaacactgtcaataaacaagtgttgcaaacctctctgacatattgaaaaaaaaatttacaaatgaagccttataattatcagtggtccacaatctaatacgttttcaatttacttacattttattattaatcactaggtataaaaacaaatccagcaggggaaatgtgatagatccaccatgacatccgtaaacacaacactagatttaaaaacaaactaacaaacaagaaacagaacaaataataattaaaaagctcttttctccaaaatgatgtttttaatttacctttgtattcatttgggttttgattattagaatatcctcacccttttctaaccctttcctgatacttgattttttggatagtttactattatgtcatttgtgttttttgatgagtataaaacccattttgttaggagaagaaaagtccccattacctgaactgttgccataaagctcctaggaaagtagaaaatgcccaaagttattttcctttttcttctcttaaaaacccctttccaataaaaacaaagaattggcaagcagccattttgagagcaatcagtattggtaaagctgataaaaagagaaacatctttgaggctgtggtcccttctctaccatccatgtattttagtacatcaataattattttttgcagagtgagaaattcaggaaactgggcactttgctttcctaagctaaggagatagggcgcagaatgtattttcttatatctgaagacccttgtggatgatgaaggaattgaaatgccacagtaacaaaaactacaagtataattattgattaacattcttgagggataagatgtgccagactgtgttctaagcgctttacctatgtaacctcatgtcattctctaagtgaaccctatgtggtaggtttttattattatgattattgtcttccaccttttgaggagaagaaactacaaacaaacaataaaaaactaaataaattttaattaaaattaaaagttaaaaaaacaaaaaaaggctgggcctggtggctcatgcctataatcccagcactttgggaggccgaggtgtgtggatcacctgaggtcaggaatttgagaccagcctgcccaacatggtaaaaccccatctctactaaaaatacaaaaattagctggccgtggcggcgcaagcctgtaatatgagctacgcgggaggctgaggaaggagaatcttttgaactcgggaggcggaggctgcagcgagccaagatcgcgccactgcactccagcctgggctacagagtgagacttcgcctcaaaaaaaaaaaaaaaaaaaaaaaaattaaaacttaaggaactgagacaaggtgtcattatacaagtacccactgcaggagcagagcagacattcaagcactagcaccatggtaccagagctcatgtgttgctgttttaggctcacgtttgcctcagtgtctttctggggtgtttctgtgtgcacgtatgaaaacaaaatgtatatatatatatatatatatatacacacacacacatatacacacacatttatacacacatatacataaatgtgtgtgtatatatataaacacacacacatatacacatatatatctacttgtacacgtgtgtatattataaaacattttaaaaaatttaaaaatatttaagagcattaatcagttaaatcagttttaagccaaaagtattacagtgactcatttcaataacacctttaaaaaaaaaaaaaaagcaaaacacagtgaaacttacaaaaagaaagagtaaaatgctagttgccagaggctggggaggtggagatattggagacgtgttgttcaaacgacacaaaatatcagttagacaagaggaataagttcaagagatcttttatacatcacggggactacagttaatatattgtgtacttgaaaattgataaaagagtagattgtaagtgttcttactgcacacacacacacaaaacaaacaataataagtatgtgaggtactatatatgttaaaaagtttgagttagccgttccacaatgtatacaaatatcaaaacgtcatgctgtacaccataaatatatacaattttacttgtcaatgaaaaaaactgcttattttccactattcatctaaagtaaaaagaaaacaaaaactattatagttaagtgcttccacatattaaatatctgaaaagataacgttatttttcagaaaaaaagcaaacctcccctccgtgatcattaaaaagattatttatatatgcatctttaaatagatcgcttttaagtttcacctccaaggtcatatttacttaatgacttggaaataagtgataagatagtctttactggaaatgatttaattctctgccatctagctaagggacaaatatttttgggaaagagccagatagcagatattttaagtttcaggggtcaatctctgtcgcaactcaataccgccattgtagacatacataatatgtaaatgaataactgtggctgtgtttcaataaagctttattatgaatgctaaaatttgaatttcacttaattctttcatgtgacaaaactttattcttcttttgatttttctttttaccattaagaaacataaaaagcattctgagcttaaggacactagaaatctagccattgaacaggattttgcccaagagccatactgtgttgatcctggatctggataacaagaaactgctaggattatctgtgattgctttgccttgctaaagtctttcttttgcctatagttacatacgttattttgtctatagctatatatgctcattattttatcatctaatgtatcttttttaaaaaactgttttcaacttttaagttcagggggacatgtacaggttattcagttttgttacataggtaaacatatgctatggtggtttcctgcacagatcattccatcaccaagtattaagcccagcatccatcagctattcttcctgatgctctccatccccctgtacctccaacaggcactagtgtgtgttgttccctgccatgtgtccatatgttgtcatcattcagctcccacgtatgcgtgagaacatgtggtatttggttttctgttgctgcatgagtttgctaaggataatggcccccagctccatccgtgtccctgcaaaggacatagtctcgttccttgttataactttatagtattccatggcatatatacaccacattttctttatctattctatctttgatgggcatttaggttgatttcatgtctttgttactattgtgaatagtgctgcaatgaacatacacatgtatgtgtctttataatagaatgatttatattcctttgcatatataccccatattgggactgctgggtcaaatggtatttctgcctctaggtatttgaagaaacaccacgttgtcttccacaacggttgaactaatttacattcccatcaacagtgtaaaagcattcctttttttatccaaaaccttgccagaatctgttgttttttgactttttaatagtaaccattctgactgctgtgagatggtgtctcattgtggttttgatttacgtttttttaatgatcagtgatgctaagctttttttcatatgtttgttggcatatgtatgtcttctctggagaagtatctgtttatgttcattgcccactttttaatggggttgtttgtttttttttcttttaattttttttaagttccttgtagcctctgtatattagacctttgtcagatggatagattgcaaaaatcttctcccattttgtagtttgtctgttcactctgatgatagtttcttttgctgtgcagaagctctttagcttaattagattccacttgtcaatttttgctttcattgcaattgtttttggcgttttcatcatgaaatccttgcctgttgactatgtcctgaatggtattgcctagattttcttctatgactgttatagtttggggtcttatattttagtatttaatctctcttgggttaatttttctatctggtataaggaaggggtcaattttcaattttctgcatatggctagcagggaatctttcctccattgcttgtttttgtcaggtttgttgaatatcagatggttgtaggtgtgcagtcacatttctgagttctctattatgttccattggtctatgtgtctgtgtctgttctcataccagtaccatgctgttttggttatggtagccttgtagtatagtttgaagccaggtattgtgatgcctccatcattgttctttttgcttgtgattgtcttggctatttgggctctttcttggcaccatatgaattttaaaatatttttttttctaattctgtgaagaatttccaatggtagtttaatgggaatagcattgaatctataaattactttgggcagtatggacattttcatattgattcttcctattcatgagcatgaagtgtttttccacttgtttgtgttctaatttttttgagcagtggtttatagttctccttgaagaggtcctttacttcccttgttagttgtattcctaggtattttactatttttgtggcagttgtgaacgggagttcattcataattctgctctctagtttcctgttgttggtgcatagcaatgctagaaacgttttcacattgattttgtatcctgagactttgctgaagttgtttatcagcttatggagcttttgggctgagatgatggggttttctagatacagtgtcatgtcatctgcaaacaaaaataatttgatttcttctcttcctatgtgaatatgctttatttctttaccttgcctgactgttctggacagaacttccaatgctatgttgaataggagtggtgagagagggcatccttgttctggcttacaagggaaatgcttccagcttttgcccattctatatgatataggatgtgggtttgttatagatggctcttattattgtgaagtatgttccttcaacatctagtttattgagagtttttaacatgaatgaagattgaattttatcaaaggccttttgtgcatctattgagataatcacatagtttttatatttagttatgtttatgtgatgaatgacatttattaattgcatatattgaaccaaccttgcatcctagggatgaagccaacttgattgtgttggataagatttgatgtgctgctagattcagtttgccagtattttattgagaatattcgcatcgatgttcatcaaggatatttgcctgaagtttttttttttttgttttatttttttaatctctgccaggatgtaacccatgtcttagtgcattaagaaacaccagtgcatggaggaagtctactaataatgcacatgtccaaataatcacagaaagtatatctatttatttatttaaaaatctgtaactttgttcaaaatatttttctggaactggagtatcttacagcagtaaaaatatttcctaaggtaaaaccaattttagagtatataccacttgtaatataatctacctttcacttgatagtctttatcgaatctttcacagaagtagacaggatatgaatgaatgaatagataagcaaatgcagacattctcttcattttatggaggcagtaactgctattaagtggtgttatataatgtactcaggatctcagaacaattaatcagcatggcctggctgcacctcaattcttctaactacaagatacttttacacctaaagcagctagcatttaattgactgttttaatagaaatacagggtgattaccaatctacttgatcctttttcaattctaattatttttctaccaaataattgcacgttttgagagtttctaaatactcaactgtgtgtataaatcaatgattaatttttccttgattttaataatgaaaatagagcttcatatgatcaagaacctgaaataatacagttcaattaacataattccattaaaaacaaaggaatggaacagttaatctattcgtcgtcactgtgagacatagcagatgttctgttaggctgtttgaaatattagaagtatttcataaggctcctatatctgtttttctagactacatattgagaactgctgtaattacagtatcatcctcagtgttagatgtaaaatgttaagaaaaatctgtccatctggcaagaggaggtaaaagtttgttagagtgggcagaagttaggtctgatagcacctaggtctagagaaacacaaactccaggtaatacatatattctagtaaggtttgctccatttaaaaaatacaaacttatagaaacagaaaggcatttattatgctcatttagtagcaataaatgccttctaatatctttgaaaatttatcatgcattctcttcttaaatgtcttcaatgtgtacagagcccatagttaataacaattctaattattaaagaatatttccattgatttcatttaagtctctggtcctgcaacctccatttgttgatttttggcttggccctttggaataactgctcagaacaatcttatcttgtacataaaattgctttagttattcttcataagatatgatttctatgtttatgactgcaatatttatagccaacctgtgaagagcgtactatttgccaggcatatttctatatgctttatgtgaatcaataatttaatttttataatagatcaatgagttaagttgtattaccatttccattttcataatgagaagactgcgttatcataaggatcaatagacaaaagtcacaccaaagtcacacagctggttagtaagtaagaaaaagttttgatggttggaacaaagtctcacagctagttaaacagggagccagaattcaaactcagacagcctggctctagactaacacgtttattttgtgctttattaaatacccagttattggattatccttctggctccaggttcttttttaaaaatagctttcgtatgatctgagaaatattcttacatcaaatacatttgtttgctctctctttgagatttcacacacagaaaaaacataaatgctcaatcattaaaggtggtgaagatagctctttctcatcttgtggtcctactgaaaagtcattaagaacaagaaatcctgtccaatgccctgttataaaaagtaatgacagtaaagaaattattctgagcaaaaccaactaatttcaacagtcacagcaaaaagtcaaactcagatgattcaatttactcattgatgtagaaacaggagaaaaaaacatatttgaatcagatgatcaatgatcaaggaatgatgtgtttcctgttaaataattcttaattaaagaggaatgtttttatagtttttcaatagaacatcttgctatgtattattatcttgagtcatgctcactgtttttacatactataaagtttaagacatgttttactttcttgtcttaggaaattcagtaaaataaataaattgaattatatattttttgatcattcagaggtctagcattttttattttcttctaaatataaattctcattatgaaactctgtaaatgtagaaactatggaacaaacaatatatagaatgctctttggagatcaaaagaaaattaatctttttcaagtgattttgaaaatgtccattctagtggaaggaatgctagccaggtagaaaatgagggttctaaaaaaactctgccactaattcacgtctttcctcatttgctaaaataaaggaatagggttaagtggccacaaattccatttagttctttagttgcattattagaaaagtgatgtttgttccttatttttaaagtgtgaagagcaaaaccaaaactgcaggtatttgaaattagctgtactctctttaatatagtttattgtgttgatgcattggtctcataagaatcaaagcctgcattctccgtgccggttgactttggagcactaatgagttgtaagtgcatttattaaaccagtatcactccacggcctaggcctttctctacagagaaaagagctaatgaaaggaactaatgaaagagactcgagctaatgaaaacaaaaatcaactcaacccccaaacaatggtgtctggagtagctgaattatccttcctcctaaactaagaagtgtctcgcatttccaaaccgtcagtactctattgtaattgcttttgtttggactacaaagtgtttgggggctccagaacgtagggtgattagtgatcccaatatccatgttctctctgctaaattgaatttagcatatttgttacaggtgatccctggggcctttgtacacacagaaagaaatcaaattaataattcaaaacgtaaaagctatctgttggtctctcttaacttaatttgtttggggtcaggtccacaccttctaattcagaacgcgatttcagtgactcttgagctgtgatgctcagtgaatggagagtagaaaagctcgaggagacaaatctccttaaacacaataaaaccgacagtgggagaatttccaaaatggggttgtgattgaaaatacacattgacaaaggcttctctttacttctgcttttcataatataaactcaaatatgtgtgtacatatatatatttaaagtttcagactgctgtaaaaattagtctgtctatggatccagagagttcatctatatcatagtggaggaatgtggaagatgagtgagaaagcaagcatgaagtcatgagttcagaaaagattgcaaaatgcttctctatacagatggtccctcatcacgctgtgttgtggagtgtcgtacagacaactgtgaaaacatggagagcagagtcttgtgtcttaagccatgcattgcctggtgcaaatgagaactccgtcatgatatgttgatttgaataaatgtatgtacacaaatgtaatcattttagaagaagcccagtcttacaggcataagcagcaaacctaaccacagcttccacctttcaaaagtccttcttacggtgctgaaggaatttattttgcattggtttgctggaaagaaaataatggtcttgactattacagttctttactttcttccagaaaagcgaccatggcctgggtatggttttcagactgcatttttacagagtatttaagggcaaaggggcatttatttttgccaaacagactgaatttcacaaatgatacatgaggattagtgaatggtgttcactgtagcattaaactgctttttttatggccagataccattccaatctaaatctgcagaagctattcatgagagaattacactgtgaggttacatttgggttggttctactcaataaagtgacataaaaagaagagccaatgtagtcaacagaatttctaagaggcaatcttattagttttcttatttataagcgtggctaaagcattaatggtgctttcacagattttacgccattgtgaatgcatgttgtcaggggactctctggatccacaggctaattttcacagcagtctgaaactttcaagcatggattaaaattatgcttaccctttacttactattagttcataaccctcaacatttatgtgaataatctaagtttctttataaaacatagaacagagtttgcaggcatgatacgcttcagaagaggtgggagcacaattttaggcaggtggtgaagaaattttgaaacaaattctgaatcaaaatttgtttagattacaaaaatagaagatgatattgttaataataacggcacaattatgtagtttctgcttaactgtttcagcaatggattaaaacaatattagagaaggttaaaacaatagaaattataatagcatatttctttgtagtaaattagaaatttaatatatattgttttatacttaattcctggggaaaaaaaagaaacttgtggcagttcagagtggattgcaataggatttattgaatcccctatgtgtgccaggcactcattcagggccgctctgcagggctttgtgatacacaaatcaaaagtgtgcaattcacagaaacttcaatgcaaacttttctctctctctctttgttgtgcaactcaggagccatggaagtttcttatttgatatagaaaatcaaaaggtatagaagatgaagtttctgcttttgagaaatttctactatgaggggaataggtgttacttttcaggatagtctcatggtcagagggttaattaacttgcttttggccaacatagctagtgggatgagtatataaaatctgaaattcagatggtctaatttaaaatttagtgttattaacattatattgcattaatttcttttaacctaaaactttgcaccaataataaacttttttaacttataattcttgtaaatttaactcctctctccaccactgcaaaaagtgcttggcaatgtgagtaccagctgcttttagaccctgctaaaaaactgtgcccaatattttgagtttccatttcagttctgcgtcttgtgacttctagttaaaagaattgtgtgcctttgtaagcgtagagtttgtacgaacaaatgatatgaaatcagttagacttgacatctaattttacatccgttagttatttatcagctgtaaacatctctagtagaattttaaaatctcagttccttgtacataaagggtcattgaagagaccagtgtttcggagatgtttgggagtataaatcaggcagtatattatataggcacttagtacatctgagagaattgataaaaacgtgtgtatgtcatgtatgctaatcacttcttagtaaacatatatttcaaccccctttatttaatgcttttatttggacatatgttgtaggagtcgttcctctcctcacaacaagatatgatcatgctatcatatattttaaagagttaagttaggaaatggagtcaattctcaacaggagcttatctgcagtagattgctttggtcaaatccaagatatacatacagctagtaaataacatacttggtaaatgatatgccaagatttggctgaatccaaagcctaaacttgtatatttaccagtatatactttctttttgcaaacaatccagttattgatcacatttccctataatgccgatgagttattcagcaaaaatatgacagtttagggaatgtctacattattcttaatttataatatagaaaatactgttaattacctataactagcaccatgtatctctcctagcaatactcttagaataaaccatagggctaagtccgcataatactttggagattttatgttttttgtgatgggtaagtgggtaaaaaaatcttcattccccatacaaatagatgatttttgacttagattaataatcagtgtctacaaaagaggtatgctcttatgttcttgctattagcaggcatgttgatgtggctatatatgttgcagtggtgataataaaaatgtggattcataatttttcacatgtatattagaaaacaacatgtgacaatgtctgtgttgacatattttccaaatttaatataaaacaaaactatttcagttttaaaaataagcacctaagtaatcacaataaggggagataataggaaaatttaaaataattcacatacttataaaatacaataggtaacataaagcaaaatgataaatacagaaaagctaaaaacaataaaacacagtttagaagaaacaaaaacacagagattatttgtatcctggaaacagaaacctctaaaacttgataaatatttttaagaacctaactttaattttgaaggatgcagtatgaaaacaatttatgaaatttcttaaacaggacaatagcaagtgcttggtgtataaactctatggaacattaactataaacatgttattccgttatattaaagaatggagaatataaaactgagaagaggctaagtagactgccctgttgacaagcaatatctaaagctgtattgttaacatttgttgacattgtagaaatattagaaagacaagaatctctataaattataattctaaaccatgggtccccaactgccgggccacagactgatgctggtgtatggcctgttaggaaccgggccgcacggcaggaggtgagcggtggcaagtgagcattactgtctgagctcacctccctttagatagcgttggcgttaggttctcataggagcgtgaaccttactgtgaacgtgcatgagagggatttaggttgcgcgctccttatgagaatcaagctaatgcctgatgatcttgggtggaacactttcatcctgaaaccatctaccccaacctcaccctcctgtccgtggaaaaattgtcttccatgaaatcagtccctggtgccaaaaatgttggggacgactgttctaaacgacaaaactactatttcaaagatataagcatagctcatgtatgtatgtgtgggttatacactattataacacagaataaaataataaatgccatattgaatcaaaactatatttcatattatctagtgaaatgcgtaccatgtttaaggtgactagagataattttggcatctatttaccattctccctcgcattcatacaaaaatattatggttgaattgtaagtgcattgctcaaaaatccttctcatgaaacgtaagcttatttaaaccagtatttctcaatttgtgcttcattgacacttaatcctataaaatggcaaactaaaaaaataattgtacatcaaaataagtttggtaaataatgaactttaaaatttctccttagatgctgggataaatatattaatgcctgctaaacattccatttgtttccttatattttctagcctgtttgggcactcaaatttgtgaggagttatggccaaaaaatgtgatcaaaagtgaagtggattttggactaagacactggaaaactcatgtgcaattccccaatctcgtttttttttttgtttgtttttgtcccctttcttaccggagtaagggaggaagccccatgttgcagatggtacaaccacaaaataacagtacctgtattagccaggggttgttatggaacagaacatcattgctatcccatgatggggacatagggttaacaatatacacatctttattgttaagcccctaggagttcagggtttgctatcgagacgtaatctagcttacattggtcatatgctatacattatacatatgtatatcttactagcaagcccggaatgcctagtatacatatgtgcaattcgtatcatataataaaaaactcttagtcttcatgcagtaaagggaattctcaaactgtttctgtcacatatcctacagttatttatccatagaagctttttttttttttaaagagtctattcatatccccttgatccagggttccatggaacacagcttgtgaaacactgattttagatggtttttcatcttatttatttcattatcctttttagcaacaagggatcaaacactgtgaaggtttactctctactggataagagagtaagtctatctttgcccaaatattaccttcagaagtttgggctacatatttataatgagctgaaaacttgtgttcatatttatatttcttttattagtttgcattttaattatatctaatttttcacattttcagacatggtaggttattttcatgaaaatagcaataatactactaagagtttctttttaaatagttttccaagtctttaatttagttgttctttcctggattttctagaattcttttactcataattgaacaccaaaaactatttttacaatggttgtacaatataatttctaaaagattaagataggttttttattgagctttggttgatatctcaaaacatttagagtggacaccagggaatactggaaaaatagggattcattttgctatctagttctttctctcgggcacacacttgttgaacatggtctgtcatcctgagcatagattttaatgcctctaaaatcatttctattcttcaggctattttcataccttaagaagttttcttttctaatttattcatgttagctttacattgcattttcaaaaacagaaaacagtgtaggatttcattatatcactttttggattatttattactaaaaaaaagtaccgccacaggtggatggagtatcttaacattaatacatctgttctcttttttaaaactggagagcacatttctccccagagaaggggactatgtatcccttccttatatttccagtgtttaagatattcattttttaaaaaacactctcttcaatttcaaagacatacaccaaagttatgttttctctcatatagtatgcttgtcaaagtgtttagcagcttatctattgatgtagatgccactaacttctttgacatgaaaacatttcttattctttatttctcatactgcttttagagccagtagctggccttcttttttcccttaagtatgaatattcatcaaggaacttgttggacatttttttgtttgtcttctcttctttcctcctggtattatatatgtttatttagccttaatcattacttcaaagtagatgatttgaaaattgtatgttctgtccaaatctcatctaaaaactcaccccatatttccagaagcccccaaacaaaatgccatctgcatctacttcttcatatttgaagtttaatttctacaactttccacaaaacagaattttttccttattttcatatatatatgggagcagaatgactcttgtcgtagtcacaaaggttccaacttgattaagcactttagagaggtacttaaaaaaacacctttccttacattgtatgcaaaattagcatatttttctggatttatgaaacaatcccactttcaaataatctctctcggataggcgtggtggctcacacctgtaatctcagcactttgggaggcctacgccagtggatcacctgaggtcaggagttcgagaccagcctggccaacattgtgaaaccctgtctctactaaaaatacaaaaattaatcgagtgtggtggtggaaacctgtagtctcagcaactctggaagctgtggcaggagaatcgcttgaacccgggaggcagaggttgcagtgagctgaggttgtgccactgcactgccctgtgggcaacagagagcgactccatctcaaaacaaaacaaaacaaaacaaaaaatctgtcctatattaacataagtatattaaaatttgacagaccagttgctgtactttttggattggtttttgaaaacatagactttagtagtaagaaacttagtggagtaaaagtaaatgaagatgagtacttttaaaatttaaagtgtggtcagttaaaacttatttaacctaacactcaattaagtgtatgaaaagtgctgagatttatccattaatttttctcataagaaactagatcacgtatttcttttaccaaaattctatttgacattcaacttaaaatccaaagagtgtaatgaaagcccttaagataatgactgtgaaatagcaatatagcctgacgtttaatgaagtggatgggtatgtctcttacctaaagagaagatgtgaaaatttaaagtcacactggttatgctgtctgtgtgtatatcttcatttttaaaaaaatcagactcttgagaatttcattacctagccctccaccaaaacaatgcatctgcgtaaatatttcacaattttccattgttttaaagttggctgatgagaggttacttagtactgtttggtatttttcccaaatcttttataccacaacccggaagtacccatgcctcacttgtggtaacataaatacatagattcatatttctgattaagttataattattattttacataaatatcttgtctagttatctgaaaaacctaatattagaatttaagatagggagatgttagttcagtgaagcagtatcttcattaccaaatacgtaatgtgattgttgattgtacatttggaatgtcacacagttcattcttgttcccactggacataaatcaagatgttacattgacaacttgtcctacaagtctaaaataagagtcagttttgtcagaattgtaggcgtatttcacttactcataagttgaagattttggagagatgaacgaggtgatcagaggatacattcaataatgtttttgacctttatttaaaccctgtcagtatgaaaacttcagaataaaactataaacatatgtaatgagtgtgactgtcaggtcaaaaattcaaccgtgaaaaaaattttctctggaagacaacttaatatctttcttaagccctattcttctgggttggcaaaataaaattttttggggggtttgtgactaagtttcagaggactttcatattgcaagacaattcatatgcaagttgtcctcaagtcatctctctatgcggtatctcctgaaagaactgtctccctatttggtcttcgattacagatacacatcaactctcttccctgcccacctgttcctttcatttaaagtggccctctctgctgctgattacatgcatggccatggagatcattctctggtttccatccatggatgtcagtgtctacaagatgagttcattggcctaaacctggcatgcatttcctcttgctgatgctctggagtctactgaggaaggtcctctttgctcttgaatctcgcattcctctctgggtttttgccagttcccaaaatctctacctgagaagaaggcatggagctcctctcagcatcgcctctcatctcttctgctgtgtctctcttttcttcgctcctgggtctccagctggagacaaggacacagagatgatcagatatttactagtttctgcattattgtctctttcccaagaagtctcatggaagaaacaaacaaacaaaagagggtaaaattggaaaagataaaacatgtaaagatattaattttttgtatcttccttgtaagcttgacatcattctctttcaaaacacaaaggtactgtcatgtatttgcacatccctcatgtcttctgtcattatttactcttctgaaattatttcttctcttggaggagtactttctctgtgtaattttcaaatgttgtttgtgtatatttctgtgtgtggcaaaacttttgaagtcttctattccaaagagtatatatatttcaacctcactttcaagtgatgaaatatctatatataaaactgtaagccacaagttatttttcttttacactttagaagggttcatccttatcttcttgcatcgagggtttcttatgcccatctaatttttgttccttgtttcgggaagtcttttgaatgtttgcactttctttacttaaaatatactatgatacatctaagtgtaggtttttaattctaaatgttatgtgtgttagtggtgagataggtacaaatgcaatagaggaaactaggaaaaattctcaatccatttggggtgtgtgtgtgtgtgcgtgcgcatgtgtgtgtgtatgtgtgagtgtgtgtgaaacaccttcctccaaatcttaatcttacaggtctttttacctcatcaaaaaaactcagtaggtcaaaaactctgtgttgaattggtacctcttgaaagagcctgatgccccactaacatctgtggtccatcttgaatggggacagcttatcacaatagaaggagctattgatcgtgacttatccttgagtcccctcctgctcacttgacatttttgtggtatcgtactagccctgcacagcacacctagccctgttccgtggatttagccttcaggattccaacattagtacttgaggcttgaggactgaggaggtgagtgtaagcactaagcattcttcttgtcttgggtgcagatttcacagtatttccaaagattcgttcatactccatggcttgtgcttttgaagtttcgttttcattaaaaataaaaacatgggccgggcgcggtggctgacgcctgcaatcccagcactttgggaggccgaggcgggcagatcaccaggtcaggaaatcgagacaatcctggctagcacagtgaaaccccgtttctactaaaaaaaaaatacaaaaaaaaattagctgggcgtggtggcgggcgactgtagtcccagctactagggaggctgaggcagggaaatggcgtgaactcgggaggcggaggttgcagtgagtcgagatcacgccactgcactccagccttggtgacagagcgagactccgtctctaaataaataaataaataataaataaataaataaataaataaatagataaataaaagcatggtcaggttttgagaatgctgacatgactaaaaataattatactttacgaccatcttttccctgtaaagttaaatggtaattgcataatcgtatttagaataaaagagagtttcagagtgtgcctctgctctttccacccctttcattcataccactatgctcaggcctccctgtttagaaatttggggactactcctgagatacagagtgagaagaaggaaaaattaggacaaagccgtaataactcttactgctcccagtatttgcattaattttttgtgttaaataatttaatccatctaacaaccagtttataacattagtgaccacagtgtcgtcattttgtaacaaaggctatttggaaaattaccaaaacccaaaactgagtaagtagcagagctatattttatattcaggttttgtctgcctgtcaaccactttttttataaagaagacatctagattaagaggcaaaagacagagctgctatcctagcgctgtcaatagtgtgatcttccataagccatataatttctttgtgccccaattttatcttttgttaattaatagcataaagccctattctagctggtttgagcattaagcagaattacataagtatagcctgtgaatatggctagtattatcacagtgttctgtatacattagctgaatttcagtttgtgaaaaattaatccatatcccattttctcagtagaataaactgtctaattagttggtatttatcatgttatttatttatttattaaatttttttgacagaatcttgctctgttgcccaggttgtagtgcagtggcacaacctcggctccctgcaacctccgcctcctgggttcaagcaattcttctgtctcagcctcctggaactacaggcactcgccaccatgcctgacaaattttcatatttttagtataaacggggtttcaccacgttggccaggctggtctcaaacgcctgacctcaagtgatccacccacctcagcctcccaaagtgctggaactacaggcatgaaccaccgcacccagcctatcacattttttaacacagtaaaaatgaactgacttacatgaatcagaaatttgtatagtgtaaagatttactaataatttaaaggatacaggtaatacatagatacaggtggaacatggcctgaaggacccaggattcttcctaggtggatagatacatcctggactggatacatctgctggaccaaagtaatggatgagccattgcaatgaaggtcgctgttcacctcatgtagccagaagtatcatgaactgttgccactttactgatcattcagggattacatgacattttccaagagcacatgcttcataaatccatagatcctctctctcttttttttttttttgagacagcattttactctgttgcctaggctagggtgcagtggcatgatctcggctcactgcaacttctgccccccaggttcaagcgattctcctccctcagcctcccgtgtagctgggattacaggtgcctgccaccatgcctggctaatttttgtgtttttagtggagacagctttcaccatgttggccaggctggtctcgaactcctggcctcaagtaatccacccgcctcggcctcccaaaatgctgggattacaggcatgagccacccaccgagacacataagccaccacgcccagcccatggattctaagtgtgttcacctaagtggttccacaccagggacattctgctcaaatcatttcataaacaaaaaaacttccttctaataagtattagtacagtttccaggaagggtcagattttataccagagtcaccaaaatttttatccagggagagaaataaaaccaggctatgttcaacccaatcctctccatgtggccaaagtataatgagattgttgtaataaatactgcagtaaatattatgattttattttttatgcctgacgttgttgtaactgtaaatggggcaaaatcaaatcaagtatcatagattgagtagctgttgtgtacatggtagctttgaaaaaagagaaatttacttgtgatcaaaattcctttcaatgtctagaaatgcttgcctcttcttatgacatgataccattcttatctttgaaacagaataccttatataatagaaacctagagcaagcaatttcacatgaggtaacaaaagagttcccagagtttttccagatcagtggaagacttaagtacaggatggagggaaattttaaaattgttcaaaacaagaaagcatttccccattagagaatcaaataactgaagagagggtgtgtgtgtatctctttacagtttcttttctttttgctgtttatgtgcttgcattatcaagacattttcccaatatcctacttttattttagtagcattttcaaaatctgtatcaaataaagatagcaagtagtagagcaagatgaatgagggagggagaaagaatggattggtagtggaaacaacatttcccacaagcctatttattgtagcattgacagtaggaattcttataaatgctaggttaacttgaaattctaccaaatgtctgttactgtttgttttaaatagaattctagtatctcgggtaggaaatttattacaggcaaccctaagaagatatattccctaaactctccttcaggtgatgggattaatcttggtaaagtgactaagttgcttcttgatggttggtacattttgaaaaagaagaatcacattaactccagagcagaaaagaaccgtagatcattcttactaagttcattggtcttacatgtaaattgagaaagattgctgaaggcaagattgccccaaggaatttaacttgaaatcaagaggctacataaatgtaaagtgctactgcttaaataaaaaatattatgttttaataataatcatgataatatgacacagtatgaagcaaatatagtgaaaactagaaaacagtcttggaaacagttgctacattgttattaaggactaaaccaatttagaggatcgtggctgtgaacattttaatatcccactcagctccaaattatctagagaaatcttctacacattctacaatatggaatgcccaaggctgagggtgttgcagaaaataagataaaaaaaagaaattatatttgcaaccagactagcactttcttcagaacactgtgatgtcagtttcacatcagtgaacatttattcttaaaaacaaatccctattattctttgcctcagtggtcactgagctaagaaaaagaccagttggttctaggggaaaaaacaaaacaaaacatgtgagacattgaaacagtaagtgagaagttggtgaaggtagctcccaggtggattctgtcacatgctgatttattttcaactctgaatatttagcattgcacagaacacttgagcaactcttgaagatccttatttagatggctggagagaaatctacttgaaatatacagtatactcacctatgagtcctgccctacctcaacaaaatattccatcgcttttattgttctatattctataaaggcccaaaagactgactatggaagtggactgcttacaacatttatcttagtccagctctgtatacagcatattaattttagactttttaggtattcaaaaagtagcaatttatactaactatggcttcaatacctagcaatatttttattttattgttaattttgctttaaagatatctattataaagagaaaaattcaaaacagtatcttaggaaggcactggtcagcttgcctaagaatacaggtcatattatgctattcaagttacatttcagattaatatacttctgctagatttatgctgcatctaacatttgggggaacaaatggatgtattaatatgattttaaatgctgctctgtgcttaacttttattgctcaatggagagtgtacgccacagcacagttatgccaagaatatggtttcagtaaaagaaaggagctaatttattgtctcaataactagctcttttcttatttgatgttaaagaaagaaatgtgcatgtctgaagttgaggttcagcaatgcattagtatttgccaaattatgagtgacccttctaaaggctataatattttagtttcacctattatgttatatttattttagaaccaatttacaattttcaaattgtttcctacatttttattagttttatgatgtaacatagaatatatactgacaaagacaatattattttctttgacattacataaaccaaaaaatatgcattgttataaaatatgagaatcttgcaactgcaaatcagaattgagaagctttcatgcttcattaacacctgtgctataaattcaggtttaacaatttgatgaaggaatatttcagattgcaataatcacagaagtatttattttaatagtttcaaaggccaagcagaaatctgttacagttaataaacatcctaaaatggttcgtgtatgataaaagaatatcaatggtgtttactcattactctggggattgaaattaaatcatataaaaaaactgtgtttaagttccatatgcatttgttccttaattgtcagtgttttgaatttacgtcatacgcacatttgaaaaaatggggataacaatttgtgaccttttattaataatattggcttccaaaattggatgataataagagagtctctaagagcttatcttttttcaacaggaagcttcctcttattcttaatttaattcacaagattcccatgaagtatgtaacttgaaatagcatttactgagtaaagaaaaatggttaatgctaccaacaccaatacatatttaatgattgagaaatggctgttaactatgacaaaactatcaaatcacaaattaagaggtgcctcagaaatcgattgtcatccttttatccacatttagggaaaccaaaacacagaaaagtaatgacaattttctaagacaaaacagcttgtcattccataaagtggctactacaattgggtctcctgccttccagctcaaaatatttcccctatactctgtaatttcagaagggggataaagaatataggattttttttttaactttttaaagttatttttatttccgtctcttttattaaattctttgtttatagaagattgcacttaccgttgctctgttctcatattttataagcactttgtttttgttttttttttattatactttaagttttagggtacatgtgaatataggatttttacagtaatcgtttgttaaaacattttatttaaaactaattaagatgcatggaaatttgcaaagttagtgcagagattccatgcattttaaactactttcctctaatggttgtatcttaccaaactagcataataaatggatattggtatgatgtttgtgtaatgtcgatcacacataatcactgcaattggaatatagaactattctgttaacacaaaacttttcttcacactacacctttatagttaaaaacgtcacccatcagccctatacataacaacttatatccgtctgctggatgtagaaaccttgactccctgtaagtccttttcagctttgattatcccagctccatcctctttcatctctttttctgttactctgatgacatgaatgctaaatctgttattacagtgccacagctccctaaggctctgttcattcttattttcagtctttcttttctgtgttgccgaggcaaggccattgataccattctttcttctaatttactgattctttcctctgccctatacattctactgttgagtagatcctattgagttttttattttgcttattatattttcagttctaagattttcatttggttcttctttatatcttctatttctttgttgagactttctttcattggtttcaggaatgtttattatttcttgttaaaacatttttatgatggctgctttaaaatccttgtcagataatcccatcttctgtgtcatcatagtgttggtatttttctattatattatgtaatttgtggcccttttttcctcttgtgcatgttggtatttctgggttattggcttctctctataagaaaatatatgaagcaaaaagaaaatccaaggaattcactgccatgtatcctcaggtccctatgtccccaatgaacctatcttttctctgcttttcagaatcttcttaatggatgtttcatctacagtatcaatgacttggggctgcagttcacagaaagaatagagaaattatgtgtactccatcttggagttgaactggtagccctagctagccctttgatatcacaaacacatatgtgataatgggtattattgaaagaaaggaaatatacttaaaacgacatttaagatggcaccttagacagaattttgcatatttcatgaatgcccctaatattaaactggttgatatgccttttagtatgatgacaagctttagttgacagtcgtacaaaacctgtgattttacagatttcaatcagtgatgattgagagacggcactatcctgtcagcacagaaccatgttccttgtattcaggtgaatgaagattatttttattagtgatgtacaatccagttgatttctgtggagcactgacatccaatctgcctagttatcagtccactatttctatacagaacacaattttaatgtcattcccgtgttcctcagtatatccttacattattaaatacggacattatgcaagttatttaccaacactgtttctacgttgtaccttttctaaaaagcttttcttttccaaggagataaaacaacaacaacaacaaaggtaatagtcataatacattttaataattaataacatgaactttgagctatcttaaagccaatattgcattttaaagaaaatatgacatttagctgtattaatactttgtgttttatatcttatagcagtttcagttatctattgctgcatagcataccaccccaaatctgacagattttaaatgacagtaatttatttcttataaatttgtaagtatggaattctgtcagggccaagctggttagttctattccacaagggtgggcaggatttactcattttctgcattaagctggtagctgggatgaaatttccaagaaaacttgattaacttatatgggacctaacttcctcgtgtggcttctctactgcgttagttttgttttccttaagattcgaaacagacttctaagagcatacaaaaatggaaacctacaaatcctcttaaacgaagccacatgttgtctattctgtcatattttactggtgaaaacaaatcaccaagccagcctaggtttaagagaaaagggatagactccacctcttgatgaaaggaaagacccaattttattgtaaaaggcatgtggaataaaagatattgttttatgatcttatcttcaatttttttcctcttggaaaattaacatttttgaacctcagggatttttacaaataatttgtaaattaagtaagcaattttcggtcttttaaaataacacatcacgtagattgaatgggatttcttatttcataatttgtaaatagagatgctgttattttcatagtaaaaatatttatttatttatttatttatttatttgagacggagtcttgccctgtcgtccaggctggagtgcagtggcgtggtcttggctcactgcaagctctgacccccgggttcacgccattctcctgcctcagcctcccgagtagctgggactacaggcaccgaccacatcacccagctaattttttgtatttttagtacagacggggtttcaccgtgttagccatgacggtctggatcccctgacctcgtgatctgcccaccttggcctcccaaagtgctgggattacaggcgtgagccaccgtgcccagccataaaactgtttatttctaaataattgtaattggtcagtgcagttgagcctttataatgtttagagaatctatgcccaataacagagattttaagagtattcagtcgatttcccttttctctggcattaactcaatcaaaccatctcactccttcatgtgttgtatagattttccaggcttatctctgacctttccaccactccacagcctacactcttgacataaacaaggccagctccatggggatgcgacctatgcattccacagggtgctgaactcaaataggctgcacattaggtatagtgctctgctgtcactgtcttgaaattcttaatcattttttaacaacgggccctacgtttttattttgcactgcgttgcacagattataagccagtcttgtttttatgtctagaatgagctttctatacctcacaatattctactggacaagttttcaaacagtcttcaagactcagcttaaatatcattttgattttcaaaattattctaattccctaaccctagctatagaaggaataagaagaaataaggtctcttctatatatatatatacgtatatatatacatatatatatacacgtattctatatatatatatacgtatatatacacatatacatatatttatttatttattatttatttatttattttttgagatggagtctcactctgtcacccaggctggagtgcagtggcgcgatctcgactcactgcaacctctgcctctcaggttcaagtgattctcctgcctcagcttctcaagtggctgggactacaggcacgtgccaccatactcagataatttttatatttttagtagagacggggtttcaccatattagccaggatggtcttgatatcttgacctcatgatccacccacctcggcctcccaaagtgctaggattacaggagtgagccactgcgcccggcctcttctatatattttgtcttcataccacttaccataaacttctattataataattgttttattattatttgtgtattcattttcatcctccattagttgggtttaaaaagcatgatactcattattacccacttagtaatttcccagtacataatctatgacatgtatagtaaatattcaataaatatttgattgaatcaaagaacaagtgaatagattaatgcaatgtagttatgtatccttctttaaaacactgtacattgaggtacggtataaatttgttcgataacagtgtttgccttatatctctagtgaaacttctcagttatatttttgtctaattctctttgatcctcactggaaatataagacatcttttgttatcagatattcaatcgcctttatacagttattacttgaacttaaattctttctttaaacttaacttctcagagataataaaagccatgcatgtggtttaacatttacttttacttaacatttgccattctgtatgttttattaatttatatttggaaactcatctaccactagattctaagtccttgtagaagcttttacttccagccaaggtggagtagcagggaccaaatttgctctcccctctgaagaaaacatcaacttagagaaaagagaatatgaaatagtgattttgcaagactctgaacatgagtccataaagctgtaaatgaataaagtagcatgatctttgacaggttggaaacaaatttgaagagacctacaacagccccagctactgtgtggaaagaatgattccaggatgtcatgcaggtccaggaggttgtctgttgtctctctgggttgaggcagagcagtcttgaaaggccaagctggccatagtccttagagaagactggtggagaggagagcactgcacagaaacgatgttccagagatctaagaagaaaccctccggaatgttcagtggagaactgattcgggagtgtttgaggaaactatctgaggcaggtaaataactactgaaatgattaaaaggaacaattcctgaagctcgcatagagctcaaactatctgctgcttattcccacaatccagagagaaaagtctcataattcatggggcatgggatagagtttgcatcagtagtaaagcaaaattaaccctacactaaatgctgctctgatctcaactaacaactttcaagcaagacccaaaatgtttccaagtaacttaacttgtcataaatgaagcttggaatatttctaggaaacacaaatgtccagatccaatgaggtaaaattcacaaggtctgtcatccaatcaaatgttgccaagtatgaactaagcaggaaaatataacctagaatgaggagaaaaaaatccaaaacaatcaatcaatactgaccaagaaataatactgatgatcaaagtagtaaacaagaacatttttgttttactattgtatcccatatattcaagaagtgagaatgatgagcgagcatgaaaattagaggtacagaagatataaaagagactctgatttaacttctagagattataaaatgcataggctgtgactgttggcagcttagagattgtaaagatgagtgaagttgaagacagcaacagaaaccattcaaaaggaaacacaaagagaaaaaaatgactgacaaaaaattaacagagcatcagtgagctatggggcaacttggggtcctaaaagggtggagaagcaggagaaatgtttgaagaaatgaggagtgaaaaatttccaaattcgatgaaaactatcaattaaaagatagaaaattttcaaaaaaaatagaagttcaaaaaaatggaaaaagctaaagtacatcattatcaaattggttaaaactaaagataaagataaaattttaaagttatgctataaacttcttgagtaggattgaatgtagttcaacatagtgacatacacaaaatggctgcttattctatactagtagattcattttatcaaataaaatcatttcttgttatagatattttttaaaccttagatctgtcggccatttcttagtattccttagtatgaagtatttcttaccccctttacgtatttctaagaaggtaggtgacatataacaaataactttgaaataaaagttttagtttgagtttgtttacgcagaagcaagagattttgcaaaaggaacacttgttttcaataatgtaatggtctagctgatggtcaactgactcaccttttaaaatttttactgtgtagtaagaaagttgggaaggtagtgtgaatccatttacttaatcctgggacacgttaaaaagaggactttatgaaagtcctctttagtgtataaataaataatactttatgaagtattgtataaattagtatatacataatagtatatataaaaataggtatacatgaatactgtatgaagtattattttcataaggcagctatattgattgcattgctgaactgtaaaaatgattgcaaaccaaaataagagagatagatagatagattagatagatagataagatagattagatcatagatagataatagataaaaattaattgttttggaaaaatttggaaataaagtgaatataataaatacatatatatgttagcttagaactggcatctgttaatggaaaaattgtattatacttttccctcaaagttccttactttctctgaaaccagcctgtatataacaatagccagtccgtatatggctacgcagtttatcctgatgtagttgcacaccttcctttgtgccctgaatgtgggctctttgagatccactgctgttaccaccatctggagactgctcgggctcctctctcagtctgtggttttatgtcaaatccttttatcctttaatttccacatctgtacatcctccttagcactaaggcatcttttgataatgattataggcatgcaacattgccctagatgtaaatcaatcatggcaaatacccttgcagagaacagtatctctctataaggacatacaaaagaaaactgtattatgcttgaaaagaaatatttctgagatcactttattcttgatctctgaaagtcattttaatcctgcatttttattcactgatgtatccttgtatctgccatctctttctacactacatccttttatttttcccagggctaagtacccgtatgcttttcctttcaatttcaaaatgtggaccagatgttgggacataagtactagtttggaacaaacatctgtgcccttttcaggcaagaagaaatgagaatgaggtcaggcatctggttaaggacacaggaggcatccctgtctcgtttcttaattagttcttctaagaccttctctcattctatacataatgtttataatttaaaattcatagggtcttatgttgaaagggagaaaccactgtgtggaatataaaataaaaactcattttacagtggaaaaataatttaatctatccagcttattatttttcctgggcataaagaaaatacaataattaggtagctgcatattttaatagcttttaacgctgattgtaaactcaatactgaagaaattagtggtcagttggtctttctatttttattaacgaaaactgccaatgagaggaaagctaatttaaaaatcgtacaagagtaaccttaaaagtgacttaaaacatgaaatatataaaacacatgagccacttatgctgttataatttctaaagttataccatattggctataaaccatgaattgatatgaaatctgagcacatgcatacatatcactcatccttatacaagtggagagttttttcttaaaaaaaagggggaaatgtttatgtttcaatatacttgttccattcctaataaatgaaattcattgctgatctccataatgggaattcttggctggtgtcagattaaatgtgaatttttggaagtttgtgaatgccagaaaataaaaggtggttgatttccaaaatcaaaagtaagatactttaggtatgtatgtatatatgtattttaatgttttcagcaaagccaactaggaacacaaaaagcaacagcagactagcaaatcacaacaagatttccgggtcagtctgctggtcaaatgaaagttcttatctacctatgatttaggtgtaactaggaaagcaagttgcttgacagaactgaaaatagaacaaaaagttccagattcatccaaatctgaaagtttagatatggaaaacttcctctgcttgggctttatataaattttctgaagtctcacagatcctttcaaagggtttgctgttactgagaatagaaataaaatctccagattcctcaaaatctgagattctaggcctggtttacttgttcttttggagttttaatttttaattaatcttctcccaaacttcccaagttctccttaaggcctcacatcagtttttccagctgtgatgctgtgaagcaatgccttgtcagcatcaggcctaaaagaggtcagtatccctttaaaataaatcttagggtttcactaaaaaaataaatatgtctataagcattcagctgaatgtggatgatttatgcttctatacatgcaacagcccatttgcaattttgctttaatgggatagagaacagatctaattagtataaagaaattggtaggaaagacagtcttagaaatcatctaatccacaaagtataaatgacaactttctattctttgtccatataaaaatttttatgtaatttaattaatatttaaatgtatttttttcaaactgcattgcataacaccttgatctttattctactggcctcattcagattaaagttttgcagattttgatgtggaaagcactatggaatcaagcctgagaggatcagaatcatcatttgtcatttgctaaatgcaatgtcaagtggtaattcaagataaatgccttaaagataattctgcagtcacagacgtatttttagaagtgttgaattagatttcatattctcaacacttctgtgatctttatagaaagtgatggacatatgaggtacataaactatagatagttatgattgttttagaagctgaggtaaagtgtaatgtcatcaagggactgcatgtgatgaataaaactaatgactagaaagttaatcagtgtgaatattcaaaaaatgattatatattcatttttgaagctataaatgaatcaaattataatttgattcatttatagcttcaaaaatgaatatatatatatatatatatatatatatatatatatatatatatatatatatatagtcacccaggctggagtggtgcagtggcacgatcttggctcactgcaacctctgcctcccaggttgaagagattctcctgcctcagcctcctgaggagctgggactacaggtacgtgccaccatgcccggttaattttttttatttttagtagagactgggtttcaccgtgttagcaaggatggtctcgatctcctgacctcatgatccacccacctgggtctcccaaagtgctgggattacaggtgtgaacaactgcgcctggcccaaataatgtatttttatgtttaatttgcaaaaattattatttttatttatttctcaaggcacatgagaaaatatcaaaaattatttttaaaaagcattaatatataatatgatcatcactcaacaatgagttactgtcatacacttgtttgaaggctacttaaactatccataaaaggaaccaaatcatatcctttgcagggacgtgaatggagctgggggtcattatcctcagcaaactgatgcaggaacagaaagccaaacacctcatgttctcatttacaagtgggagttaacgctgagaacacatggaggggaacaacacacactggggcctgtcaggggtatgtggggagggagagcatcaggaagaatagctaatggatgctgggcttaatacctaggtgataggttgatctgtgcagcaaactaccatctcacatgtttacttctataacaaacctgcacatcctacacatgtaccctggaacttaaaataaaagttgatgacaaagaaaaaaagactgtgagatgcatgttagattattgatatctaattaatttcatttaataaatgtctattaagaaaaaaatcccatctaatacgaaaaccacgcaggaatgtacaataacaaaatcaaagattcagtcaccctcacatgcatctcttttctggaattttggtttgtagcacatgctacaacattagacagtagggtttatgtggtacaatttttgtggaacattagattttacatatgtcctatacacatacatatacatacatacaaatatctatgtaaaacctgattcattttgtgtgccaacttgactgggctatggggtacccagatatttggttaggtattattctgggtgtttctgtgagtggtatttgggaggagactgatacttaaattggtgggctttgagtaaagtagattgccctccataatgtctgtgggtctcctcccatcagttgaaagcctgaatcaagcaaaaagattggcttctcatgagcaagaaagaattctccttcacaatgctcactgcagatttaggacttgccaccctcgatgattggctgagctaattccttataatatgtgtatttctctctatatatacacatcctattggttttgcttctctggagaactctaatacaatacccacataaaatatgtcacttcttgttggttatgaaaatactcttgcatatcaaaaactctcagcactacttaacaatcagaaggcaacaagattatatttctttcaaatgtaactcacagattcccctcttaattcctaccatgtaatggagaaatcaggcctgcttcatttacaccatctttgcatgacttctactcaccgatgaaattgattttctcaaaatagcatcaacattaaaatttgtcccatggatgctgactccttccatggttttccaagaaggagaaaatatatagatggttatgtgtaggtccatgcgtgtgcattttaagaatacgaatttccacatgctgttagcaccagtcatgtgatattagctcagcaggtattaccacctcactccctcaggtagctccaattgcaagagtgatatagccaaaacttacaattggaacctggttataatatcaacatcacagcacaaattgcatgtagctcaggtcactctctttacttgcctccttgcttcaaaggaactaccttctccttgcaaatttacccaagcctataaagtgcatggagtgtcagagaataaaatacttcctgaacatgacatttgggtaaagtttgattgtctaattattatggaaagaggaaagggaaggacgcacaaaaagccacaaggaggttttaaaacacaaggaggggccactggacaagcgcggtgcctcacgcctgtaatcccagcactttgggaggcggaggcagatgaattgcttgaggtcaggagttcaagaccagcctggctaacatggtgaaaccccatctctacaaaaatacaaaaattagcctggcatgggggtacatgcctgtagtcccagctacttgggaggctgaggcatgagaattgcttgaacttgggaggtagaggttgcagtgagccaagttcaggccattgcactccaggctgggtgacagagcgagactccatctcaaacaaaaaacaaaacaaaacaaaacagaaaacaggggctactggatgcttgtgagaggcagaacagaggaagtttaacaacaaaatggcggccaagcttgggatttagaactattggaacaagagcagattcctaaactggccaaatctcaggagaatgttgacaacacctgtgataggttatatataaattaatatacaaattttgaaattgtcaggagaatgaagtctagcttcacagcaaaagcagttcaatacattacttgttttaataaaaaattataacaaggattattaattcttattaagtgttaacaagcatgtggagaaaagggaattcttgtatactgctggtgggaatgtaaatcagtacagccattataaaaaagacagtatgaaggtttcacaaaaaattaaaaatagaactactctatgatctagcaatcttacttctgggtatatagccaaaggaaatgaaattagtatgtcaaggagatatctgtactccatgtttattgaagcactgttcgcaatagccaagatatggaatcaacccaaatgtctattgactgataaatggataaataaattgtatgatatatatgtatatatactacaacatacacatatataatgaatatactacaatatgcaatgaaatactatgcaacctttaaaaagaaggaaatcctgtcctttgtgacaacatgaatgaactgggaggatattatgctaagtgaaataagccaggcacagaaagacaaacactgcatctcacttacatgcagaatcttaaaaagtgaacttacagaagtaaaatgtagaattgtggatgtcagtgtctggggtatagggcagggaatggggagatactggttaaagggtacaaaatttcagttacataagataagtcagttctacagatctattgtactgcatggtaactatactttaaaataatatgtaatcatgtattatgcttttgaaaatcgcatagatcccaaatgttctcagcacaaaaacaagtatgggaggtgatggatatgttacttgggtggacttaatcatttcacaatgtacacatagatcaaaacatcaccactgtacaccataaaaatatgtaatatttatttgttaataataccttaataaggctgggcgcggtggctcacacctgtaatcccagcattatgggaggccgaggtgggtggatcatgaggtcaggagatggaaaccatcctggtaacacggtgaaaccccgtctctactaaaaatacaaaaaaaaattagctgggcgtggtggcaggcacctgtagtcccagttactcaggaggctgaggcaggacaatggcgtgaacccgggaggtggagcttgcagtgagccaagagagcaccactgcagtctggcctgggcaaaagagcaagactccgtctcaaaaaaaaaaaatataataataataataataataccttaataaagctggaaaacagaaaaagaaatttagtaagaagatacagtaataacttttagtagcatttgtttattgctttgcaaaaatctttaaatttttaaaataaatgtgattctcacagaaaaattatctaagggagttagaaaactgtagtggaacgtgtctagacaagaataggtgaattgtctgaattcaaatctagtgaggagtagaatcagacgttggtcccttaccttttgactccgtacactgtatgtggtaaagaatatgtgaaaaataggattcagtacctgtctaaatttaagtgtatttgggatagacaacttaaatacccacactagacagcattaaaagtcacataatgctttcacataatcatttgtaggtcagtgttctggaaaaaaggaaaatcaacgtagactaggctatttttatgtcaatgtaaactgtcactgctaaaaatgaaccagaaatgtgaaagataaaatattttcttgtttcctaataagcttctctcatgctccatggttatttttattttttgaatacagtgcaaatattactttaaatattctaaattttttcttagagtttttcattgaagaaacttctatttggcgtagtgaaaagacatattctctgaggcttgaatgagttagaagacctccgaaaaataggtgatatgatccagagaatagtttggagccaaaaagaataataccacatgtcactacctggagtaattaatacttcttggtgtgtagcacactgttttatctctacttaaaccaaagcatagccttgttttgttgtataatttatcagttctcttttcttctttgtttctcctttacaatttttcttctctttcttcaagaagagatctgaatgagaattagtatgtttactagctctgactcatatgcagaaccctgataaagaaaacagatgatcctctatttccctacacagccacattctcccccttctaacttcacacataaagggaagttgattattatccagacactgtcttcccttctgaccttggtgttttcctttccgagcatctcaggatactaatcactagttgatctctttattaaagtaacactgctcttgatattggtgtgagatgcactccattagtacgttttgttttcagaatatctcttatcaaagccagatataatatagcacacaaaatagtatgtgttctgcaatatcaagaaaggagattttttagtcaaaatatatcattattactggataaatacacatgaggcccacgcagagttcttgacattggaaaaacttatttactccttgtagcggggaatagtatgttgacttagtagcattgtggatcacatgattgatcccttgcaacagtttgggcgtctctctcatcatctctttctgaatagtccagaaattagtagtagttctaaaaattacttaaattacccaacatcaggctatttcctcaagtcttctttagagggaaataaccagattgatggaggaggaaacaatgcatcagacattaaccttcccccttgcaggtgaggtaggcctacactccagttcgtcatgggagcaagggaagggcagaaagaggaagttgaatagactagaaagtattagaggataaatgggaagaaatagagggaggaaaataaaactggaaataaaaacttaagacagaaataaaaacaaaaaggagagtgatgaatacaagaagagaactgttatcttgctcaattcttcctgtctctgataatctattctatgtttcctcaagggctttgttatattaaatgagttttgccagaattatgtgtactgttgccatgatttccatgtattcacctttctttttgaattcttctgtctcttcctccttcccttctttttgtctcctgctacccccattagttccaaattctaagcaaaggtaatctactcttcagtataaatgaatgtttctgtccagtggaatcaatatgttaaattatcttgccaacctgttaaccacgtgtcaggaacattgttcttaaatgtgattgtgacaaagcaactagatatcacagtatacaagtaatatatatgatacacacacacatatacgtacatatatacatacgtgcacatgcatatatacacatgtatatacatatatgcacatgtatgaatacgagtaatatatacacatacatatgtgcatgtatgcatgtatattatatacatgtatacagatatatacatatgtgtatatgtgtgtatatatatagagtaacttaaaatattttgacaaaaataagttttcatcaatactagattctaatatagtgttaacaagtgctaaaatttaaaaaaatgatggcaggtttgtaaaaaacaataaaatacaatctattcacttatctgtttcccataaaaacagagaaaggttgacatcctttgtttggtgtggatcactattttaggtgagcctgggaggaatgatttgagaagcagtgctttagaatatctgaatttgagaccagatcaggaaacatggatatacaatgtgtttgatcctgctattattttaaattttctcctacttattttcttatattcaatttggtcacaatgcattttcaaaacaaagcgttcattttttgaccacaaaaaacagttcgttaatgaaccatctcaacagaatacttttattttgctcaatgtctttcctttgaaactgtttttttttttttttttttggctctctttcttttctctccaaacaacaaacaaatgaaaccgcaaaaaccctgtcaatagaagtaaagtttttaaggcagatttattgtctttcctcctccctatcagaatatttaataagggtgtggctttggaaggaaattgtctcagtgatggcagaagaaatctacgtaacagatcatattgaatatattgtcctaaaatgaattatttcagagaatagaagaaaacctcttatttgttaactcatctgccttgtggaaattggaaacataagctaattaacagtaatccataaaacccattagaggtgtagatgggaaagatactttttgaagtagtaagtctgtaaatacatagttgcaccttcttccctctttttctcttcctcctccttctcctcctccaattccacagctaatattttcactatttgcgaacttatcatcatttttaatactgaacacgttattctgaagtgatccatcttgcattctaatatcgagtgcttcataaatgagcagcctagcaccacgcttagcacactatgttggaaagtcttataaatgactttgatcacaaaatgttaagaaaaagttgtttccagattggctgggcaagcgggaatgaatttgagagttgtttcactgcatcattctggttgcaaatactctcttgaattttaatgatattgtagcctgcctcagtgcttggaccccatcaactttacttccattttctagctgccttttctgcagtctatgatcattccatttctgaacctagtctggtgtctgctttaattggcctgcttttgtgatttgttcagttagattggagcttttcagaaagatagtcagaagccctgcccatcaccgtatccccagctgaagcctctttgactagtctaaacatacacacacacaccacacacacacacacacagccctttatttgtgtttgtgttttctagtgcaagatgttgcagtcttgagtccaaatactcagaggctataaaggcaacagtagctagctaaatttttccccactaaaaagcaaagattatgaagtttgtttttttaaagggattaaaatgtggcagggtagcaaaaaggactcagattgtggaatggccttgagcaaagcattaaggtgcaagtctgcagcacagaacagtcagaaacctacccagctgtgggtcttgttcttcctccatctaagttccagagctattagcagttccagctctaactcttcaatgtgacttttagtgaggtgtgtagggtaaattgaagtcctaggtctcatttgtagaaaagtattaggtgggctgttccctagtctgtttgaatcatcaaatcatagaatttctgtgcattccatgtatgtgtggcagaatcacttccctttacacaagatggctaaatgtttaaccagcttctggagaggcatttaaaaatgggatcttctgagactttgcatgctgtcttcagacctatcttgtttcagagtactagagattgatacggcaggataggttattataggaaacatattttcgtagtccagaaaatgagaatttatttggtttatgttgttgtttttttatatgattctttggctaagacactaagaatgaaatctagttattgaaatcaattttatcaggaattatcacatatacggtgtatgaaaattattatctggaagttggaaattattttctttgctcttttgttgagtcgcttattgacttaagtggtgtttgctacttacctgagtagtgggcatttgaattccaggactttgattggacctctggtctggttttgactgtttacgctgggctacaccataaaagctcgttgggttctaaagactgagggaaatgatgatgtaaactagaatcaaaaagttgtttttacttccaactaaccagcaaagaagcgattcttgaataccaagtgaggggattaggttcccttcacttccctttctttttggtaaaagctgatacaaagtgaaggatgcaccgggtcagaggatctgagaggtgagaattctgactttcatgtgagtggctgggagtgggatcacatcagctttcaaataagtttttgcagcatcgctattaggaattctgtgctgtttcgtagaacttcatctttcctatacacaatttcgttacagcagggctgcatttgaactacaacaatgcttaccaaatgtgtttcaacaggctgttgttttcaacactggttaactgttaaattttacctaatacaaactgatagaaaggatcattactacagattagtgagtacatttaatctatcttttcacccttttcccaaattccctttcctttattcatttggacagctttccccaacaatatttattctagattccagtagaaaatgctgattttgaagtaatcaggaatttatagcataataaaagaataatagttttaagcgtaataaatgactgaaattgctcataattgtttgatgattttagtcattgaaaagcctgattaggcttcatcttctgatcagaccaattgttgaataattgacaagcaactaattaatcctaaaatgaaacagtctgatctaaaatatccctacttaatactttattgtgcttggcatactgctgttcctgtgaagacagctatagtgttttgatgattatgtgcatagctgtaaaaattaatatggtttacacatacctcttcagtaatatattttttatacattcaaatttatttcaatgtacttttatcttgtccctctttaaactcttctaagtacaaagtggtatcattgggggattaatggctatttaataatttaatgttaacaaatgacaatatatgaaagacttccatcattcaagtagcctaaactatttgcaaagaatttatgaactctatcatatttgaaaattagcgtgttaattttaatcagttttcaagtatattaccacttcttaactatattactaccatctggtcttctattccttaaaatgtagaatgttctggtaattattttgcctttaagaaaaactaatacaaaaaccaagtatttgtgatggagtcgttgacatgactgatttcagtatctctaagtaattagttaaaatatgcttgttgctttcattaaaagcaattttacacagactaatgcaaaagatgatggtagtaaataggttttcaggtcatttctgataaagttaaatgtggttgtcatttcaattgatcattctgcatcttttccagactgtccatccatctcttggaacagcctgttcaataaattctacaggaaataatttgggtgattttagagaaagtgcatccttagattaaatgcttttgggtacttttatttatttctatgatggataagaatatatttcagagtgttagtttcctgatttataattattgaatttccttgaaaaataactatttgaataaatcccaaatgaaatacaaattctgtgcatctcaaggaaaacaatgaattcaggtaaagttgatctagtactcacataactatatttacatatgctagataaaattattgattacttagcacaaagttataatgtcttcctgttattgaaatattgaataataccttggaatagtgtgagagcaatattgttcaatgtaatagtagttgattaaaaatacatgcatacatggcagacttgacaagcatcttatttattttgggaaaaacttgttcaagagttaaacagtttcataaagaaggtgcatttgtgttctctaatacaatcaggtaaaagaaaaaaggtaactagagataaaacagaaatcttgatagacagtatagaaagattttgggtgcaaaagaaagcataatattagacatctaaaattttttaaaaagtacatcaaaattatctcaatctggagaaagtcaacgaagaaaactaagaataataacacagtatgataaagaccgtgatcccccacttgtaggtaagaacatgcatcatggacataaagatggagacaataaagtgacgactactagagcagggaggagtagaggggcaagatttgaaaacctgttaagtactatgcttagtacctgggtgactggataattcataccccaaacctcagaatcatgcaatacacccaggtaacaaatctgcacatgtgccacctgaatctaaaatcaaagtcaggaagaaaaaaaaaaaaagaagacaatgatctgggtaacacaggaagtgcaaggagagtgtacaacccagtctaatgagtttcaaggaaatgtcaaaagactgtgagattgaactgactctgataattatcagtaggaatttgtcttgctgttgtgctgaagttcatgcaaaaatgctcaacacatagttttttttgtttgtttgtttgtttttaaagaatttcgacaaagaaataagctctctgctttggaaggtcggtaaaagtctaagttgcaacttaaaaaaagatggcaaagctgattcacctgttgcttctaccttcctcagtaagaataaatagttgggaatctggaaggagtttaaaaaactctgcaaaatgaaaattatagactgagataggtgaagcaaaaataagagaatgcacaaccaaattaaatgttagtctctagaacctgataatatgtctaaatactgaagaattagaaaagtgtttaaaaaaaactgtggaagaaaaagaggcacaggatactgtatagaacacttgttttctctgatgtcaagtaaaagaaatgatcagattctaaaggcaataaattgataagttaggacaatttttaaaacatttcctgaaatactgtgttgttgcaaagtaatatgcagcatccagctcctccttccaggaagatctgctgtcccagttgcaggaagtgctggaggtgagctgcctttacctgtcgccccctttggggttccctgagagtctggctgagggtcaagcccacatcacagcaacccttctccttctgaccaatccagctgccttcccctccctttcaccagtgtttgccccaaagcaaactccagtagccatcctgcacatcatctcggtcccagagactgctccccaaagaagataccctgagaaaatgttggaagcattaaaaaaaaaaaatagtgccactgcccagttaaagaaacagaatatgtataaccatttcttttgaagctcatacatgctctttctcttctcaaattgtttccacaaacttcagaggtaaccactgtcttaataattgacttttttttttttttttttttttaagatggaatcttgctctgtcacccaggctagagtgcagtgacgcaatcttggctcactgcaacctctgcttttttggttcaaatgattatcatgtcttagcctccctagtagctggaattacaggcacctgctaccaggcttggctaatcatttatttttatttttagtggagacaggttttctccatgttggctaggctggtcttgaactcctgatcgcaagagatccacacgcctaggcctcccaaagtgtgctgggattacaggcgtgagccaccaaccccagccttaattgacattttttttttttttttttgagacacagtcttactctgtcacccaggctggagtgcagtggagcaatctcggctcactgcaaactccgcctcacgggttcacgcggttctcctgcctcagcctcccgagtagctgggactacaggtgcccaccaccacgcccggctaattttttgtatttttagtagagacagggtttcaccgtgttagccaggatggtctcgatctcctgacctcgtgatctgcccgtctcggcctcccaaagtgctgggattacaggcgtgagccactgcgcgcggccttaattgacttttaaactaatcactcctctgtttttctttataaatttaatcacacatttgtatttgtaaacatcatgttttattttgcatatttttgaaatttatatacatggaatgagtctgttgatagtattctttattttgttttctttaccaaggcagctgaagatgcaagggaatagaagatgagttcacaaagaaaaaataaagagataataaataaacatcattaatgaagggcatatagagaaacaactcttacttgcaaaatgcctagcacatatgactcccactacctgatacgtccctttctcctttctctgcctggtggagacttgcccagatattgcctcttctttcctgaatgaatctttctaatttttcttggttgtgtttcttgctatccctaactgccatattttattttattttattttgtttcatttgttgagacggaatctcgctctgtcaccaggctggagtacagtggcacagtctcggctcactgcaacctccgcctcctgggatcaagcaatgctcctgcctcagcctcccgagtagctgggattacaggtacgcaccaccacatccagctaatatttgtatttttagtagatacagggtttcaccatgtcggccaggatggtcttgagctcctgacttcatgatccgcctgcctgggcctcccaaagtgctgagattacaggcatgaaccaccgtgccaagcccatattttatttttttttatctgaatcccatgtatctattttactaagtagcccagccagataagagtaagccttactaacaagaattctgtaaaaagtcttcctacctttgctttcagaaccatggacccaattaccaattttctgtttgtaacgatacttacatgggttaataaaaaatacaatattcacagaatgattgggagtggaataagaatcacatattattccccaaaaagagttagacaaatttaagttatattgaaaacaagcaataaacaatacaggtggatctgataaaaatcttaatccaggttcactagaaaatttgatgaaaacatgatctgggtgagaacttgctcttgttctccattgtttactggccttcctctgtctggccacatcctgcaacatagaagtcacttccttgaatcagagtttcagacaagtcttaagtcgaacctttgatagcttcaagttctccttattagcttgtatgagctgtatacatttttaagtcttaaaatattcttggttctctgcttttatgctataaggcatctcagctgtgaatcaacaatggagaaatagctgctgggtttaattggacccaatagtcttttctgatggcaaaaatgtaatgagttccatgatgtttgctgtgatagagcactcctttctgttccatttccatgtggccttgtgccagcataatgaatgcctcacacatagtagtttctcaatttgtgtgtgcagattcaataacaaatgaatgctcaaatgaaatctcaataagataaatggcgtgtttgaacttctcatgtaacacatatatagttaacacaaaattattttaatgataactattcagatagtgtaggcacattttgaattatccagaaaattgactttttaattcctataagtgagtgttggctattgcctaaatttgagaatttcaggaattctgtggatagcaaatgattagaaattaagatccataaatcactttttttgtgggaaatggggaccagttctggtagctgaataaagaaaattccaacagattctgtcagtttcccagatttcttaagaatctgaaatgaacttgcaagtttgaatgaaaatgtccccaaagtagtgaaaataaaagctctcatgggcatcctggtttggaaaaatattataaacattttatgtagctcaatttaactttcctacattatcgtcattctgcaaatgcaccgttacataggccactgttctgtatggtgtttcaggtagttctgtttcacagtgggtggatatgactacacagttccacattaatatatttagacctaatgtagggaatatggaggtctgcgctatatatggctcgtaaatcaataacaaatgagtccacatttatgcactatttacagtgaagttttgtatattctgcatccaaataattgcacttattatgttccatattttaaagaaaaatcacatcttttctgctgtagaaaatggctaagtagataacggatttctgaactaaacataatatgtagcctcaaagttaaagcaatacgcttgcattgcactcggataaccactaggacctcagagcatgagagttctaatcaattttgtttcatatgatttgttcatcattaatctaaaaatgtattactacccaacacttacataaccataccataaatatgaaaaagtaaaatcactacatctaacaattgatggaaatatatatgtgtatccaagctttaaatcaatatagattctctacaagcaaattcaaatattttcttttgcatctttctagtattaaaatacgttttacacaagatttgaatatattttcctttcttagccacgtagttggtattttgcaaggtcagtcagcctagctgagagtcgaattagtttgagcagatcatacttggacgatccaatgcacttgtaattctgctccttgagcttagagcctcttttaatattatcatttttatatattataattgtacatcttttcattttaaatgtaatggcattagcagtgggatactagatacgtgaagccaaatgataagtgtgcttaacatcatttgcagaatttgtagatgtttagagaggctagggaagaattatatttatattcagagaagtagatctatatttggcctgaattttcaacatttgagatttaaagaaatgttgagcctacaccttaatcatgagagttgtccgtgatctagcatctctgaaggaacgtctacaggctctgtggggaaaaatttctctggcagggtcagggaaagaaaaggcttcaactcctttcagttaatgcccaaggtgcccatagacaattctagaagcacaagagtggaaagaggtcactgggtaatgagtaaaactgttctaaggggcatgtctcattaggtgatgtctaggcagaatgtataaaaagataaaaagtccttgaattatctcatgcttttctggcttttttcttgcctcttttcccttcttcttttcctttcttcttttcctattttttcctttctactataaaaacttcaaaacagcccacttctatctttcctgtccctcaggaaaccaaataactcattggatgtttgagttgaatttgatctaaaccatctcttgatttccagggtgacaatattcttctttctttcttggatattgtggtttactgaagaaaattaatctcaataaacgcccctggatttaaactatttttatcacagtctacttctattcagtttatgttctttccacctgcaactaaaattatgcaaaccttaggcatttgtttttgtgatacaatttatctccgaatacctattttgtatgtttttccccccatttttctattcaattcagtaatccacaatgggatacagtctcctgggtcccacaggtttgtctcaagtattgttttgttcttccaaaaataacatctttaaaaatcatatttacattttgattacttctgtcttgtagaataaaagatttcaggattgtgtccaccgtacaaaaatcagaaatttatttttagtaagagccatctgtcagtcagaatctgacctagctaactgggtggatggccgaggtcattttaatgtagttggctagtaaaaccctctctactctctaaagaggcctaggttggaatggactctccatgattgggataaagattaaaatggagtgtttggagattctgagtgctaaatcaatatttctgcacaatgtatttcaatatatttcaggacttctgtgtagatattatttcagtttcaaagtgcatttatttttttttattttattaacctacttttccaaataaactatttgtttctgaatatttatatatatatttcatttatataatataaatataaatatatatttcattttccccaaaacatatacttaccactcatcttggaacaattttgagaacatttgccagaattttccagaatcccttcttattttatttatttatttgtattttttttttttaccatggtctacctccctccatatattcctttatgtgtcttgccaaacagggaaggagaatgctgttgttcttcacatgatttgagctttagcattggagggagttggcattctatgctgttatatttcctgtgttatatacaatactctgttattgcccaaagaatcattattgattttaaatgaactgtaaatcatcaatcgatctgaaaatagcacagacttagttacaatcatgaaaataacacatctttaaaaaaaactaagatcagttttatgttaattgtattttatttaagaattatagtgtattattaaataagcaaaggaaaaataaaagtagacctgactgtatctagattttgaagaaagatgttggcatttatatccaggtagaagtgtattgctcaatctgatgctgcttctcatctctacttatcactgtaaccagagggccaggtttaagacttaactgccaccagcttaggtgtgggtaactcacttgtgttctctggagcttagatccctaacctgtaaatttggcttgaaacatatgcctgagcacgagcgcgcacgcgcgcgcgcgcgcacacacacacacacacacacacacacgtacttacatataaacaaatatgtatatgctatatatttgtgtgaagatacatatataatttatttttctgcagactggatgtcaaaaaaagcacatatttgaaatattttgaacttttggataacaaatttacatgatgatgtgattctaatatattgggtatgttttctagctgttcttagcttgctgggttcaggtttctaacaggtcacctggcaatgcagtgattagaagaaacttcatggaagagatggggctagtgtcttaaagggagaagatatgaattggtagaacagaggaaattcagttcaaacatagaaaaaggaagccctgcattaaaatttgttacagtacatcttgaggatgagaagagacctatttcaatgaatgaagtggttttcatttggaaataggcagaaaaaaatatagagtgcagaggcctttaggatcagtctgtgttaactattagttttcgggaggcagagccagccattgagtggtttggacaggatggtataatgatgaaattgaagtttgggaatgattattctggcagtgaatggtatacagtcaagatctgggagaccaagattgacagactgaaaatcagtgggaaacagttgtagtgatctaaataggaagtgacaagagcctatatcacaatagtgacaagaaaaatgaaaaagaatgagtatatctgagatagatggcaaatgagtaactgacagtatttgatcatacttccagtcctcccaataccccaaaatatcacatatatttttggccagggagttggagctaatgatgttgtcacagtttgacagcagacatgaaaagtagaagtcacagagaagctgaagaatttagttttcaactaaatttatgattttttatgttgggaaattaaaaatatcctaaaggcactctaaattgaaaggtgacccacgtgaaatatcaggtgagttgatattgattaggaagctgtctctacacaggtggttgttgaaaccgaaaacggaatcagctctcactgaaatgtgtttcccattaggctatctactcctcaggataaacctagtcatttgtactggtttcagatacagtaaaatatcaacttcacctttatttttctctcttttgcctttaagtacaaatgtaaattttttcttctttagttacaagaacaaatttagagtaggttgtcaatgtctattgccaagtaattgcaatattcacccaaagaatcttgtaatattttatgctcattagcaattccatttgatatccaaaatttcaacaaaaggaaaattatacacttgtttatccaagctgaaggcttttgaagatactgcagaattcatagctgctatggaaaataaagcagcataactaactcctggtatttattttctcaaaaaagagatttgattttttttatttcttttttgtgtgactgtaattattatcattattttttacttttggagaggcaagcattttgtgctatgaattgaacgtagagttgtacacagaaaaatatttgttttcatgtttcctttccctaaaatgtctgctagagtacagatgaagattctacctagaatgaagataatcttttttgaaacaattggttaagattaaattgatttggtttaaataagactatatatggagaatctaataaacattgagacaagtagatacaacaatagtttaaagaagaaaaactgaatacatcctattcagtacaaccttagataaaatctcatgaatgaaattacttggcgagtagggctacaaaaaatagggaaatcataggcgcacatgctctagcaactatggctacgcatacactgccgcttcccaaaattttctatcaattttaaacaaaggtagagaataaaattatggatactatcttagcaagttttcttattttttttaaagtaagattgctagtgctgcatgaactatttgttttccccaaacacttgagttgcaaagaattttatttcatggaataatagaatccattaactatgatcctagagaaagagaaagttttcaattagttaatataattatatttgttacaagtcaatcagcaacaactcagtatttgaaaatccatgttttagtttcaactgaaccactacctagtcatgaaattgaggaaacgaatttatcactaaggacctcagttggcactgtaatattcattcagatagattattttaaaaacaaaatcaggtcatacatataaaatgactgtgaagactctaactgctttgtgaatgtgttgctaagatcattctagttttattatttgtctcatggaggattccattatacatattttacttttaagtgagtgataaaatgttaagcttcctaatgatttctgtggtctctagcatagagatttgttacaaaaagggatgccatattatctatgtaatcattttacataatacatggagttgtactggattaatctcaaccatttttaatttaactattactttgtagttgaacttgagcttcctctattcaaagattccagtaatcattcttcttcagcaaacacacacacacacacacacacacacacacacacacacacacacacacacatcttctggattgtatactaaaaatttatatattttggattgaaattaatttgtaaccaacaaagtttattatttagagactgtgattctgcccagattaagatttgtggcgttatgtttaaaaggaagacaataatacctaaattagatggtcagtgttaggattaaatgagataagggtcagaaagtgagtaatataatgcccaacttatagcaggtgttaaattattgtatgcattctaccgtcctccacaagcacacacggcccctcataacacaaaataagcactgaatataaaagcctcagaaagattaagtggtaggaaaagttacttttactctttggtaaccccagacagagagttggtttggggtttagttaggaaagcatcacaggtgagaaacacaagtttgaggcagttttatggcagagtgtggaggtttagtctgagtttgcggcttttctttcctcattcatatctcgtcaattaattttcccctttaaggaccctttcaagcctgagagaagagtacagaataaatcaaaagaaagagtggagagacaaaaatgaatgcagaaagagggatgcaggaaacaaaaacccagcaagtagaagggaatagtgagaataaagaaaacgagaaaaagaaaacaaacaaacatgcacacaaacaaaaaaccaccaagagagggtgatccatacctcacagtgctaattaagttctaagctggtttgacatttttgcctcctggacaccaacaccctccaagcggggcctctttgatttggtctcacatcagtagcgggctttgttatgagatctaggtattaaccccacatgtggaaagataggttaatttgactaaatatattttttaaattctccgcaccattgagtcatctaagtgtcacatctagtatctgccacctaatgttatgcttagcttctcctccttcaagtagagaaatccagataaccaacccctcccctcttcccctctacacacatgtacacacacatgcacacacacaggaaggcatgcatgcacagcacatattaaacacacaaatgaataaatagtagagtccgtggatgatttagagacatgtgaaaagtgaaagttttgggggctcaagtaatttaggagagttttctattaacatgtagtttaatgttgtctttccagttaatgtagttatataatatgtaaattaaagatggtgtctactgcctaagtaattattacaacaaataggaccgattattgaaggtgaactccttccttttctgttctctactcaaaacaatacttttaaaattgcttatttagtattgaagtaggaaaaaaataacgttgatacaataaaagaacttatttctgactggtaggtgatgataggatctgacaagggggtgtacttcagagagattgtcaggattctacacccttgtctgtgcctaggaaaacagcccaacctacctacctttagttttgaatggaggctgcaggatgttactcatcattgcttttagaacaaacacttccctttgaacgatgtcacatcactattaccatggcaacagacgccctataaagatgagttatctatgaattgtgcttctgttcaataaacacatctcttaaattcatcaggaaaaaggtttagtggaggcagttctatatattgacatttcttattctaaacctctgtctgataataaatattcatttcattaaagtgtttaattcaggtgtctttcatattagctatatcacataaatttataacagttttatgaatttaaaacagttgctttattataaaaatgatgtatttacataataaatgagattattcttatgctaaaaagcataaaaagaaaaaagaactctattctcagtgtctaaacatacagtgaacaattaatttataaaaaattaagtttatcaactttataaacaaataattttataaactttataagtatagagtcaagaattagcttaatggaccaaaaaaaacccaaaaaacttgtttcaagttaatgacttttagaggaatgcaattaagtgggtagaaattatagctccatatattttatttattttattttttatttttttgagacagagtcttgctctgtcccccgggctggagtgcagtggtgcgatctcagctcactgcaacctctgcctcccgtgttcaaacgattcttctgcctcatcctccagagtagctgggattacaggcgcccgccaacacgcccggctaattttcgtatttttagtagatacggggtttcaccaggttggccagactagtctcaaactcctgaccttgggtgattcacccacatcgacctcccaaaatgctgggattacaggcgtgagccactgagcctggtttttccaccaaagtagcaccctctgggaatgaggtaatgataacacaccgacagcaaattatttcgtagaatcatctcctcctgtctaaactgcaatctacaaaaatactttacataatagataaacctaagaggaaaatataaagtccaaaagggtaaatttctaaaacgaaattgtaaataaaagaatggaaatgattggatgccagaagaaaggcaatgagaataatttgtcagcaaggagaatgatttgattataggtaccagtgtcatggctttataaagatggttatgatttcaataggtcgcaaaaattacaatgtatatgattatatatcttaaaataatatgtaattttatgtaattatacaaaaaacgttcagcttctattctggacccttgaagaacataatattaatattttatggtgatctattcataaagaagttgatgcacctttgtagttattcttcgtcccaggttgcagaatgcaagctcccactgtcaattacacaaatactattggtttcacagtttgtgagtgtgtgtaatttttaagcaatttcttagaacctataaaatatatatatatttttttttttccttttttttttttttttttttagacagagtcttgctctgtcacccaggctggagtgcagtggtgcgatctcggctcacctccgcctcccgggttcacgccattctcctgcctcagcctcccgagtagctgggactacaggcgcccatcaccgcgcccggctaattttttgtattttcagtagagacagggtttcactgtgttagccagaatggtctcgatcctgacctcgtgatccgcccgcctcggcctcccaaagtgctggtaccacaggcatgagccaccgcgcccggcccccagaacctggtatattaatgaaaattttttttttcaaatctcagaggtaaagactagataagaaattgagtgaccaaaatcatatacttctcctaacctgaaactgccagccagtagtaaatggtttatcaactcattccagcaagtaaaatacatcagttaatactcttgcaacgtaaattggtatattgtagctcatttggtatatctcccaatattcctaattttcattttttagttcttgttaatcagtcctcaccagtcctaatcaacattttatttacattttacttattcgtaacattagaagaaatgtttgggtaatatctgtgcatacaggatatattttccaaggcaatgtagcatactggctctagaaacagatctggagtttaatgccatgtcaatcactatgtgaccttttgcaagttactcactgtcttttatcttcagtttcctgaatacaatgaaaccatctactgcgcagtgtttttgtgacaattgaactcaataatactgtaaagcacttagaacaatttttaggacataataattgttcagtaaatgtattccacctcctcatcatcatcattggaattattgcagttattttcaaccattattcagatcctattgaaaggttgaaggcttgtagaaatatatacggaatgattttcactgtcgctcggagtagcagatttatgaaattaattatccttagctccttgtgctaatactgtattatccctttagtcattttagcctggaattacactcttaaatataaccaagatccagtgggctacatcataaggaaaaagtagaagtggtgttgaggggcgtctcctgtagacaagaacaagtaagctaatttacttgaatttgactttgaatagaggtgaaaacttcaccaagaatttattgtaagtgtcccagtttaatagtgccctcagaagcctgtctaaagcaaacacaaatcttctctggaggaaagcaccttcaatctaaacttcaaagcatgcctatatataaagctcaacttactaggagtaaaacaatcaataataaaaaataatgataacttaaaaacataaagaaaagcaaaaaattgagttagtcaaagcaacagtcacaagactccaaccaagattcctagtgggtgcttcataaaaattgacaagctgaatctaagacctaaatggaagagccagaggctaagaattagaaaaaaaaaaaaaaaaaaaactccagtgaaacaaaaatttaaaaagtagaaaaagaaggagagttttctggatagtaaagtgtttgtgaagaaaaggtaaattaagggcatgtattcattttggatatagatgattttatgttttgtatgtgaatgcatatagagggatatatatgtatgtgtgtgtgtgtattatatatatatatatatatatctgtgcatgtgtatacacaaacatacactcatactcacattaggttggtcacagtggctcatgcctgtaatcccagcactttgggaggccgaggctggcggatcataaggttaagagattgagaccatcctggccaacatggtgaaaccccatctctactaaaaatacagaaattagctgggcgtggtggcacacacctgtaatcccagctactcgggaggttgaggcaggagaatcgcttgaacctgggaggcagaagttgcagtgagctgagatcacgccactgcactccagcccggtgacagagcaagactgtctcaaaaaaaaaaaattgtcataatttaaacatgaaatattttctcaacagcagatacaggagaataatagaccttgattgaataaatagatatcatggaatattatacatactcatggtcgagaaataaaaaaccttccaacagtgacattacttaatgtccataaacatttaaattattaaaagtgtttctcatttactatctcttcaatacaatatattttatttgcactggaaattttaaaaaaatatttttaaggccgggtgcggtggctcacgcctgtaatcccagcactttgggaggccgaggcaggcggatcatgaggtcaggagatggagaccatcctggctaacacggtgaaaccccgtctctactaaaaatacaaaaaattagccgggcatggtggcgggcgcctgtagtctcagctactcggggggctgaggcaggagaatggcatgaacctgggaggcggaacttgcagtgagccaagatcgcgccactgcactccagcctgggcaacagagcaagactccgtctaaaaaaaaatatatatatatatatatatatatatatatatatatatatatatatacatatatatatatttaagcacagagttgtgaatagcatgcattattgcatattgatacacattcattgttacataattttacagttaaataagtgagggtcagatattgccaaaggaagagttcaagagctggtttctaacacaggtcttatttttaaagcttgtttgtgtgtgtgtgtgcgtgtgtgtgtgtgtaatttttttggtttcctagtaatcgggagttttggaaaattatgatctcagtatgttcttaaaaatagtttatagataattccaagaataaaaaaagtttttaaatataataaggaatcttaaccaggtaaatgtatgtcttattttttacaaaaacagttaaaagttaaaaaagaaaaatagaaaaaaattataaaatagggatataaagaaaatatttttgtacagctgtacaacgtgtttgtgttttgagttagatttattacaagagagtctgaaagttaaagaatttaaaagttcataaagttaccgtaagctaaggttagttggatattgaagaaaaatgttttctacacaacgagtataatctaattgtatagtgtttataaagtctatagtagtgcagggtaatgtcctcagccttcacattcacccaccacccactcactgactcacccagagcaacttctagtcatgtaagctccgttcatagtaagtgcactatacaagtgtaccatttcttataatctttaatgccatatttttactgtactatttttatgtttatatatctttagatacacaaataccattgtgttacaatgaactatagtaacatgctgtacaagtttgttacctgggagcaataggctgtaccatatagtctaggtgcgtagtggtgtgtaccatttaggtttggttaagtatgctatatgatgttcacataatgaaattcacctaacaccacatttctcagaatattttcccactgttaagtgacacatgaccgcagtcatgcccaccaaaattcaggacataaaattgttattgccagttagaaaatattatattggaaaagtctgaatgctgtctaaaactaagaattacaaaataaatagcattcaggatctacctcctttaggtgtgagattttgttttaaacttttttgtttatattcatcagatttgcaggataacataaatactcaattatcctgagtcgtttatattcacaaaagagttggtgaatctttttcataaggatgaaaataggaatagacaaaaaagacattatactaaaacaaaaatctctgaaaccgtatcagaaagaaagaaaagaaagaaagaaagaaaaagaagaaatacatgtctgctttgaaagcacacttgttttgacttttggaaggtagaagctttgttaagaactgagttgtcttattgctacaccccatgattagagattaattgtggcatatttcttcttgaccccttgctaaagattcttcagtctgcaagttggagcattacgtctttcctccaacccttacatattcttatttttaaggtatagtttttaaaatatagttattttctgttttctttactcttggttcaaaaagcataatttagaaattgatcgtgctgataagaatacaatggcaaaagataaaaaagcttttattatagcattataataatgtgtgttatgtacgaaaaagagcaagactaggtttttttgttctttctgattttgccaggttaccttacaaatggtagtaattatcctcttttcttaactttaggcttttatgatcttgcaaagatatgacaaaaatgggaaagtaactgctaattgctattttttttttgcaatgttggaaagtacactgtgacaatgtttaaaaaaataaaacagagagtggaaaaaaatcaccatcatcaagcagcctttattaaccacttatttataaggtgatgccacggcagacaggcaggctgggagggaggatgtaagatgcattagtcacctgtgctatgtcctgtgtacttattctatcccaatgaatgtccacagcaattctaagaaatttgaataatgataccaattgagagatgaggaaagtcagctcagaggtatagcaaaatttcttatgtgatacacctaccagtggtaagtggtagaattggatttgacccagatgggtctgatttctgaacacatgctctttccttcatatttcctgtcatgatggaatgcttacttttttgaaagatgcaattcccagataacttttcagaatatagagaaaagataatcccatgaagcttttattttgagacagggtctcgctctgccatccaagctggagtgcagtggtgcgatcttggctcactgcagcctccacctcgacaggttcaggtgatcctcctacctcaccctcctgccatggagcttccttaaataataacagagtgatgaaataatctgtacaaaaaaaacccatgacacaaattacctattaacaaacctgcacacgtaccccaaacttaaaataaaagttaaaaaattaaaaattgatatagaatctgtctatacaatttaatctgtctatacaagttaaatagattttaatcttcataaaaatatgcctttcaaatgtaagattgcatgtttttctttgtatcagttagtagtacattcattacaaggaaaccaaaaatgtacccaacccacagcagtcttttttttttttttttttttttttttttttttttttgagacagagtttcgctgtgtcgcccaggctggagtgcagtggcacgatctcagctcactgcaaactccgcctcccaggttcactctattctcctgcctcagcctcccgagtagctgggactacaggcacccgccaccgcgcccggctaattttttgtatttttagtagagacggggtttcaccgtgttagccaggatggtctcgatctcctgacctcgtgatccgcctgcctcggcctcccaaagtgctgggattacaggcgtgagcaacagcgcccagccaccacagcagtcttaaacaagataaaaatctgctttgctctaagaaatgtagagataatcatgctagggttgttttaaagcaaaaaaataaaaagttatctgagacacaggtgccttccatctcttcttataggttctagagtctggaagaagggattagggtgggattggttctggctgctacagcattaacttcattaggagaaactctgggtggattgggtaagtcaccatcaggctattggccagtcatgaaataacagatatcatagaaaatcagagtgcccatggaagtctgttttcggaactttacgatgataaatgtgacagatctgggagcaagtttaattgccaggacaatctggagagctggaggcatattcttttgggagagccaagagaggtgcttgacagatggtactttgcctcaagcctgaaagaatcgaaaggttcctgtctcattttttcacatctgttcttggctccctaagtattactcttctatgtattcccctcacctagatgccaagtgttttctctaagaaaacattgcatcttttccagctgtactgtaacttcactctgtgacttgaatttaacacaattttattgcatatgaaaatgaagaggtctggagatttctctcttatgcatgaattgccaaaatgacatttctaaacctagaataatagttttctttagagaatgagattcgctaggacccacattctcttcaattaaatcttaatacgtataagtcatgatctcattgaaataagtcattgattcattttttccatattaaaagataacaaaaacggattatgatagactagaatgcaaattctaagttgtttcagtgccaaacaatgattggtacttaattttattaggaatgttatactaatgcccagttgattctgacaagcatgtctggatttatttgtaaataggttagttaatggagacatttaaaagattcctgaaggtacccaagaaataaaaacgctaagaaatgaaatcattgcaaacatatgtctcgtagttgacaaactcttcttttaaaatggcaaagtgcaatgtcctcctaaggaagctatgcttatctcttcctagactgatctacaacttaatgctaatatctttaatttctttaacaaacagtttaggtaagttacatttgagagtcaaaagtgagggcagaggagggacttggtgatcaattttccccacagcaaactgagaaaagaaaatgaacatgagatagttgacattcagaatgttctaaaaaattcagaatatatgattgccataaagtctggggaagagaggcttacgcagcatcctcaagtacagatactgtactaacacaggtaatgagtgaatggtgttcagatcatgggcacttggtacttaaagaagcgcagtgagacggaaataaggaaaagcaggcaagagcccagctccacgtgcttcatttacaatcttgcttagagtcagccctgtttaaaatggaggtgtggagagacagagagagacccaaaccgatctgtaagggacattaaaggttaatagaactgcgggtcaatgttcagagatttttcaacaagtctgagaagtgttaagaaaagaaaaaaagactaatggctaaaaccaaatatcatttctctagatttagcccactcttcagaggtcttgctttgtttcaaatttttgaatccgttaattttaaacatttggatcataccttgaattttttccgtcaaattgtatcaccacatctagtcagacacgcggcttgctcttttctttctttagtcttacgcacgtgaggaatttccactgctacaaaccctccatcccttcaggctttctttctttcctcccttcctcccctcccctcccctcccctcctccctccctccctccctccctcccttcctccctcccttccttccttccttcctcttgctttaatgtgtgtatttattattcaagagttataagtagatattaattatatcagatttatttagctatgtcataaatttcatttattgaaaaaaactgtgtgaaatcaggactctgtaggtatacctggaatgcatagtcattttaaaaccaaactctctattttgttaggactacgctaccacaaaagcttctcacctgctcctcctaccttccttctcttcattcaaccattcactgctgcctaatgaaacgctcttaaaacagaagttttgtttgtttctgttttttgttttgttttgtttgtttttgagacagggtctcactctgttttttgtgctggtgtacagtgccatgattttggctcacttgcagcttcgacctcccaggctcaggtgatcttcccacctcacctgcccaagtagctgggatttcaggcacgtgccaccacgcctggctagttttttgtggagacggggtttctccacgttgcccaggctagcctcaaactcctgggctcaagcaatcctcctccttggcctaccaaactgttgggattacgggtgtgggccaccacgctagggcacaacagaagtttttgagcttttagagacagtagtgttttctcaagggaaatcttattagggacatggaaacagagatttcaatttgaacagctgtgcactggcacagcagaaaagactgaagccacacctatttgaaatcgctaaagttaccacccatttttcagcagtttggggccatttcccaagtctgcattttaattactatcacccaacaacagttccttccttgaataattcttaggttaaaccttttttcacatgtaccctataaatatgtacaaatataatgtatcaatttttaaaagttactgaaaactccttaacatctcactattgccttcatgatcctcagtctcctttgattatattaaaagattatattgaaaatgagtaggaaatcaagtagaaatatataaagagcattgcaaaaagctaatttagtttttaacttgtctaattgaaaaccgaacctttctcttactgctcttttagtagtaataataatgtgtatggttcatgagaaaggctataaaatataactaagttttacattatccttacatcagaactctgtgtaacactgatgcaggagttttctcagccaatttgccaactggggacctccacggccagtgacacacacacccccacctgctaccagggccacagttggccttggaactgtcattggaggtgccctgcccacttggcctgcgtgtgctacagcttgtacccatgttcggcgattcccaagctcttgtcccccatccaagaagaatgaggatatgctgacaattcgaagggtgaagatgggtggagaggaattttattgagcaagggaatagctctcagcagagaaggcacgtgggggtggtctccaacccctgaagtcgggtggtttctttctcagtgtggctgagttcaggacttctatgggctcagaataggggagtgtgctgactggtttgagtatgcaaaaaaggttaaaacaaaagcaccacttaaaggtgggcatgacagtataaaaaacaaattagggaaaggtaggtatatgtaaaatcagtgatgggtagggatcaatcagaagaaagcgcatcaaatgggaagacaggttctcaatccagtccatagatttgacttgtagcttggctttcaggctttaaactgcctttggtttggaggggggatttcactggggacctgcccctacctgcctaggcatttgtctgcctcctgccactatcaacacctcacaagtttcaataatcatttgttgtttttttaactcaacaaatatttattgaacagctactatattttatatatctcagacactgttttaatcactaggaaaaaatatggcagtgaataatataaacctgtctatcctcatgaagcttatattccaaaggaagaaaaaggcaatatacaagataaattagaaaaatgtatactatgctaagtattggtaagttgtaaaataaaaaacaatcacagaatggaaacacaaagtgtaaagactgtgggtttggataaaatggtctaaacatgttttcccgcgacataacttttgagtaaaggctgataaatgtttgttgagtgaaacaggtatgaacaaaaaacagtaagacatttaagtgtagaattcaatttaacattttatttatggagtacctgctatatgtaaggttctgtagtacccaatgggaaaatactaagataaaggtgtatctgcacttaaaatatcgtatatatttgttaatacataattgattaggtaaaaataagttcatatttttagagttctctttaaattatctttaaattcccaaagtaacactggaattttaagtagtttattcaccttactagacctcagtatccactttaaaatgaagattttcaatgagcaataagattctatatctatcatgggaatgtagtactgataaatggcgaagcagataattttttctcactttgtaatggtgactttactgtctaaaatctaagccaattatgtaattataccaatggaaaaatatgctatatgtatttgtagatatttatctataaatatgctttttatttctctcaatcttttaaaaaattatattctttctagagtgcatattatatgaaaaaggcataaagatttttgcaaagcccccccaaaaaaaacaaaacaacaagcaaacaaaaaacccaaagatgagaaattataaggctgttatatgaaaataaagtttccatgtacaactaaatcattctagctacaagaacacttcagtggcattcagagcatagaatttcatcacagaatggaatcttgtattgccccttttatcccacacccgtgtgagctttggagggttgggttctgctcacttctctggtataataacataacaatgctcatgggaagtgtatcatcatgtttttcttctttttaacaaaaaaaaaacaacatgatcccaaagtaagggaaaatcagaaagtaagttttattgcctttaatatattgtatttttttttcttatggggacttttgcaactcagattagggcgttttggaattattatctgagctgcagtgtcaagagactgactccccaaagattaactccccaaagggtacaatggtgactcacatgaaggatgcacacgaaaggctttgtcacttcggtaattggagagcgtttttagagaggatgccaggcacccatcagagcattcctactctcttacaaacccagtgctgttagtgaatcttctatggattcagaagctgagatgaaactaatgtctcatatctgtggatacaaaagaagtaaagaaaatattgatttttgattttgaattagaaattgtggggtcatcctctgcctactttgtgaaacaaaatttctcacaatttccagaaaaaggtaattcatcttctattatgtgtctgcttgtgagaatttctatataagcctgcagaaagtgatacctccctgaaactctgtatccttgatctaaagatatgaggatgcaaaaatggttgtgactgttggaaaaataagagaagcctattgtcttgttttattttctggattccaagatggtaaaactgctctgattttctataattaagaaacgcaatgtctctagaaagatggtgattggaacgtgagtaaaaacaaacaaacaaacaaaacttattttgcgagttttcatccttgtgcacacaatggtgcactgccaaatggaaatgtttgctaagaccaaatacatataaaaggttgagagaagaggggggcaggaggagagagagggggagagagagagagagagacagagagagagagaaagcatgagtaactaatacgatttccacaatgtaaaaatagaatttgacaagccaacattcacttggcaaatactgtgcccttcctcatgttcatcttgctcataaaaatgtctttgggaaactattttattgaggttaggcatcacaaatcaatccacgttttaaacatttggagtttcatcttagttccttggttcttccttggagttgttattctaaacatcaatttgtaaatcttttcatatcttcttaagcaggtgtcaaaccaactcctttggcagaattctaaaagcaacttgtacgcaactctaagacagatgaatgtatacaaaattcaggcttcatctctgcacagagataagtgtgaactaaggttcatgcttctttcatcttgctttggtttctcagttgctttatctgtttttaaataaactgtgttgtgtatattgaagctatacaacatgatgttatatgatatgcatatacagtaaagtgtatattataggggagcaaattaaaatatccatcatcttaaacattttttccttttgtggcaaaagcagctaaaatctactcatttaacaaaaatcctgaatgcaataaaatattattaaatattttctgaatttttatttgaagtagtctacaaatatttactaggtctttatttcttctgagtaaacaacaccaaacaagatgagatttgtgatgtaatgaatacttgagtaatctaagcgcaatttaaggataagtctataatccaggcagacatatctaaataataacccttggaaataaagtagtaaaaggaagcacacgctttctaacttactttccttgacatgaactcagtttgagatcagtattgaacatgacattttctttttatttatatacctccgtttatccacaagtattaagtcaaaattgattttagcaacagaataaagctctgtaggttctgttcaatgatgtcaaatctatccctgacaagtgtcccatttttgctcttcctgaatagcatggcttcaaaaaaatctagaaaatgaaaaattctatagcgcagaaggttaatagtggtgaatctctaaaataagtagattgttttggagtcatgtttgtgtcttgaatcactttaaaaattttgaaaacaaaatttgatagattttgaaaaaggttatgtttgcatttctgttgttaaggtgatgtttcctggagtgatctaaaaagaacctatgaggaggtgaaataagagaactagaaaacagaagacagcatgtttctaatcccagaaattaggtttctgggacaggtaaggaaaataaagagcccaggtgtacaaaatcaataaagagcaagaattattaaaggtagttaagagagcctcactttctcatctagcatctcaagccacccactgtctctgggtgtgttcttggtaaaaacagacacttaaaagtttattactaagaaaaaggaaagagaataagataaaaatacagtcttttgaaaaaaatctgcccaattttattgacaaaattcaccatgcatttcaatatagaatgaggaaacattaaattaggtattatttgcaaaagaaaaatgctttgtatgagggagaaaataaccatacatattgagtacagtgtaccctgcttgagtgataggtgcactcatatctcagatgtcaccactatacagttcatccatgtaaccaaaaaccatttgtatccccaaatctattgaagtaaataaaaaatttaaaaaataaaaatgcaggccggaaacagtggctcacgcctgtaatgccagtacttttgggaggccgaggcgggcggatcacaaggtcaggagatcgagaccatcctggctaacacggtgaaacgctgtctgtactaaaaatacaaaaaattagctgggcatggtggcgggcacctgtagtcccagctactcaggaggctgaggcaggagaatggcatgaatccgggaggcggagtttgtagtgagcagagatcgcaccactgcactccagcctgggccacagagcgagactctatgtctcaaaaaaaataaataaataaaaataaataaataaataaaaataaaaatgctttgtatgtagtaaaatactaaaagttatgaaaatattgaataataatattttaagaagtgaaaaataaaagtttccctgaaagcataaagaatattatctttaaaattctgttacaaaatgtttacttataatttttttcaatgaaatgaagtagcattgataccctgcttacagaacagcatgagacttgaatctgaaaggcaaataaccaacagttaggagggtatagtactgtgtgatatatgtatgactgctatagattcatttatactgactgaaacacatgttctaattaacctgagtgggggtcttaaaggattcctggtcaactgttatactgcaatgcatttttctcactttatatttaagtataccccctttaaaagatggaatgctttaaaatacatttactacataggcaatttgattaatatttgtttttattttcccttcacaaataattcgatgagctagcttatgaaggcaatgcatctgcacatttaggaatatgttccaaatctagtctatgtttccatgggcatttaccaactgcatataacactcacagcaaaagctaaacaagattagtgattcccaactaccagaggataaaatcaatttatcatccattctagcagaagccatggagttttataagtgattaaattgaaggaggcgctttgggcaatgtagaaatagagcatttcttgataaaatgatgagtgaggttgtcaaatctgtgataagcctgtgatgccggctaggcaggtcagctcctctgggaccctagttacaatggcattttcttatgtttgacatgtatctggatccaagggagagaacagatttcccaaaacaaccctttattgttttctcatttccatgtcgagtaagtaaagcatacattacatatttgtgtgttttcttcgaattaaggtttgttctagctgaccacagaatagagacaataaaaattcatgatgtgggggagagttaactggattatgtcaggggaattgtttgtgtctagcccttgcctctgataattagttaccctctgaccttaggtgaatcactttcatctcctcgttttcagtttcctcccctgcaaaataatgaaggcaagcagaatcaaatggaaagttcttgccacctctaacaggtcatttttttttttttttttttttgccttcgtaaagcactacagtataagcattaaatttacttttgtatagtgagtattttcaggacgagaatagcatagggataaatgtatgcttggttttttgaggttgaatagtaaccttaaattttgttgttgttgttatttctatttgcattctaagaatatgcttgtgcagaagtgtagacgatggtgaagaaatgagaaagggtaaggcatgagaataaagacataggagactaaacaaggtaggcttatgggtacaagtggtaaggccaaatcaccttcttcaaaggtaggcctcaaaattcaccttgccagaatttcaaaagaaggtcaaaaaaagaggaaaatgagcagcaaagatctactcagccaaattgtgagtactggattaggacggattgtggagtgaggctccttcctacttcttatatttgctgggtctaaatagaagccccagatgtgccttgattgaggatggcaaaaaagtgtgaatgctctgttgaatgggacctcaccacagctcttccctgccctgatatgtgtctccaagtgtatttgtaacccatgcgacgtgaagaaaacatacagccttcttgggtgatgatcaagtctcctaagcctaaatggtctctagatgtggctctgagttcaggcggtgatgactttctcaaaagcccacaatacgcgtggacatgtgctgatgtccatgtggaaacatgctaaaggaaaggaaagttagaaacataagaagccctccatttacttcgtcaattccttgagtttataaaattgatcttttcagatacattcaccgatttagcaaatgatgataaatacattgaatttaatcctgtctggtttatggctattaaaaacaatgaattttaatggagaacaattgaaactaaaataaaaattacaatgaactagaataaaatagcacaaattaattctgccagtcagaagtgaaacattgtaagatatcccttgtgatcttctagaagggttttgctttccgaggctctggcaaactggttggaagctattgccttcctgattttcacttacttcatcccctaaaagccttcttttttttcccatatcaagatcaaagacgaaatccatgtctaccaggctgtttgtagattttatcacttatttcatggggattgaagaactattagatgatatttgagaataacagccaaatgagcatattagccattcaggtataacaaaaatggaagtcagcagtctatctttaattttgtcacatcctgtagacttaaatcatccaactgcagagcatctgttaatgtgttctcagttcttgagttatagttaacctaatgccactggccctactaagggggaaattcagaaacttcccattggaattgtggagtgggcattaacctcgagggaataccaaggtccacagtacatgtaatctcctttccacttcttaatgaccctgttttattgtgttcattttacaattgtgaaaactgaggctcagagtgaacaacgtgtcagtctctgctcttcttgtacatgcacctacttaccacttctacttattgaatctggtctcaggacttagtactttatctcctctgtttctaaatttgggttaaagttgtgtctattgattaaaaatcttaaacactgaaaaagtatgaatgcacttaaatttcccatttctgaaaaacatttactagttttctgattaaaacattgtttatctatctatatctgtggtttgtataatcatttttatcaagaattgaaggtaatgtattttcaaattagaaatgtatactttaccgtttactatttattaataaataagtcatattttaatatgcttcttccttccagtaaacaacacttctctttttttggagagttcaatgattttagccaacttcaggcttcttagttcctgagtctacagtgtacttcacccaaacttgtcttcataagtaaatccctcataatccatattcattctatactttctcttctccaacaaaattcttacctttctagtgttcttctatccgtcagaattaaaagaagaggtcttgtcaaattgattcttattgaatattttttgatgtgatttctcaagttctccctaaatgatttttttatttattctaacatgtatctatgattacttacttttaagtaatcatacatatgatttccatatataaacatatatatacattatatgtatgtaatttaatatataatatatttaagtaatcatatatatggtttatatataaacacatatatacaattatatatgtttattcaaacatatataaacatatattctaacatatacataaacatagaataaacatatatataattgattacttacttactaaagtactgtactggagttgaaataaagaaaaagatacatggaactcacagttagtaagagaagttaaaggtacaaagtaataaatggcatgtagtctgtgtagataaagcattaattgaattcagaagcaggaaatacatctggagatgatcttggagagcctatcaatgcaactggcattcacactgcttctaaaagaagaaggatttggaaatttaaagatgggaaaggatatctgaggaggaattatagcatgagtctgcctagaccacatcctcatttcccttcaggaactgtaatgaagaatttgggagcctccttggccatcttcaattacttcacagagagaaacatcaaaatttcctccaccataagcctgccctaatttatttttgttttgttctacagagcactccatttttagcagaaataactatagattgcaatgcttgaaaccaggttgtattttgtgaaaaatacttgttttaagataaaacaatttaattcacattacttaaaattctataagcttttccccccaaactcagagaattggatcaaattggactttagaaattttcattttcaattccgtttacaatcagtaataaaattaagcattttagattgactttttctttgatttgtttatatacactgtgaacgaaataataaaacaaagttgtataggaagaaagttgcaaaaaaaaaaaaaatcctgtcggttcagagttcatttagataaaggccctttgagtcatgttccttactttctggagaggagaactaatttttactccagtagatggttcatatatcaatttaaagagggaaaagtaacacagaaacacatttccaaaagcatgggtgctgaaaagacttagactaattttctctcaagagcactaatgtgttaatctagccaaacacagtcatagtgtaagatcaagaagtatgatctatggtgtcacatttttaaaagtacacatagcattgaagagaaatcttacctgtttcaaagcaagtcctctacattcagccttccatataatttcctgttggctgtgacttcttcatactgcatcttaaatagattatctgtactctgccaatgatctgtctattgacatgaattatgttccattctgacttgtatatatacaagctgcaatttgaaatcacttttagtctaatttatttagctgaatatatatatttatttagacagagttttgctctcttgcccaggctggagtgcagtggcgccatcttggctcactgcaatctccacatcctgggttcaagcgattctcctgcttcagcctcctgagtagctgggataacaggcatgccaccacacctggctgatttttgtatttttagtacagaccgggtttcactaatctataaaccaaatctataattccactaatctataaaccaaatccccaagccagcaccacactgtctttattattgtaatttggtagtaagttttaaattggaaactgtgagtttcacaacttttttgccccaacattttgactattttgtgtcatttgcattctatatgaattttaggattagcttcttttttttatccctccccttcctccccccacaccccgaaggccctagtgtgtgatcttcccctccctgtgcccatatattatcattgttcaactcctacttatgagtgagaacatgcggtgtttggttacctgttcctgtgttagtttgctgagaatgatcgtttccaggattagctttctaattctgcaagaatagccactggtgttgtattgaagctgtatatcaatttgaggagtattgctgttttaacactgtaactcttacaatccataaacactgaatattctttcatttctttgggtctttaaaaatttcttttagcaacattttgcagtttttagagtacaagtcttacacttttgtgtgtatgtgtgtgtaatttattcctaaatattttcttttttatatcattgtaagtaaaaatttttattaattttattttcagattgtttattgctagtgtttttttatattgaagttgtatcttgccatcttgctgaactcatttattaatttgatctttttgtgtgaattccttagaattcctaaatatcagattatgtcatctgagaataggtgttaccaaaacagattatgtcatctgagaataggtgttaccaaaacagattatgtcatctgagaataggtgttaccaacacaggggttcgggctaggtcctgcatcttgcagcacagaaagccaattactgagatgatgattattgccaaggaagaaggctttaatcaggtgctacagtcgaggagatgggagttcagtctcaaaccatctgcctgatagactaaaaattaggagtttgtatagcagggaagaaatgtaactatatatgagaaaacagaaacttagttggggggaggtaaagaagtaatcctgataaatgaggggcctggagtctcattgtctggttgctataatccggtgagtttcagttcttttctactttttgggaggcctgaagatatttttctgaggcaggaactcagataaaacaaatgtaagtttcaagctttaagaccaacagggtcaatttctatgtttatccaaagacgtgtctgtgagagtgttgggttggtttcaaagggatggctttgtttcttccttctaatttcggtacctttgatttaattttctagactattttatctggccagaaccaccaatacagtgtagaatagaagtgggctaaacagatatttatgtgttgttcctaatcttcaaagaatgcatttcatttttcaccattaattattgtgttaactatgagttgttcattgttggcctttgttagggtgaggcaatttgcctctattcttagtttgttgactatacttatcatgaaagggtgccagattttgccaaaatttttttcaatctattgagatggtcttgaggaatttttttcttaattctattgatataatatactatattcattgattttcatattctaaactaatcttgcatacttgataaatcttatttggtcctggtgtataaatttttgtatatatttttggatgatgcagtctgctagtatttttgttgaggatttttacatacatattaataagaaatattgatttatagttttttctgtgatgccttcacatacttttggtatgaaggtatataggactcagacatgaactgggaagtgttcccttctattctatattttggaagtgtttgcgaaggattactgttaattctttaaacatttggtagaattcaccagtgaatctactttggcttgaagtttctgttgtggaaattttttttttattactaatccaatctctttatgtgttttacatatatgctaattttacctttcttcttgaggcagttttgttatttgtgtcttcctaggaatttgcccattttccccagtttatctcacttgtaggcatagaattgtttatattattcctttgtaagcttttttatttgtaattaaaatcctggtagtaatatctagtaatattgctgttaatttctccttttcaaccgtaagtaattagagtattctttctttttctctttgtcaaagtagtgtgttggatagtggccttgaaaaatatatgcccacccagaacctgtgactgtgaagcatttgataaaagagtgtttgcagatataattaaaggattatgaatgagattatcctgtgttatcaaggtacatcctaaatctaatgacaagtgtcattataagagaaaggcagagggtgatttgaaacagacaaaagagaagacttagacaagggtagaagggaaggccatgttaacctgaagcagagattagagttattcatcaacaagccatggaatgcctggggctaccagaagctgaaacaaacaaggaggtatttgtttgtgtacccattaaccaacctctctttattcctctctttgccctatccttccgagcctctgatgaccaccaatctactcctaactacatgaagtgaatatttttagcattatatatgagtgagaacatgtgctatttgtctttatgtgcctggcctattttatttaccataatgtctatttccatccaagtggctgcaaataacaggatttcgttatttttatggctaaataatattccattgtgtgtgtatatatatgaatatatatatatatatatatatatatatatatatatgtcatattttctttatccattcatctgttggtgtacatttaggttgattctatattttggctattgtgaatagtgccgcaatgaacacaggagttcaggtatctctttgatatactgatttcctttattttggttttagaaccattagtgagatttctggatcatactgttgttccattattagttttttgagaaatgtgcatactgttttccatactgtctctattaatttacctccccatcagcagtgttcaagtgttgcccttctcttcatcctcaccaacatttattattttctgtctttttgataatagtcattttaagtggagtgagatgatatttcattgtgatttttgttgttgttgttttgaaacagagcccctctctttcatccaggctggagtgcaatggcgcaatctaggcttactgcaacctctccctcccaggttcaagcaattctcatgtctcagcctcccaaatagctgaggcatgctgcaagcgtgcaccaacatgctggctaatttttgtattttttgtagaaatgaggttttgtcatgttggccaggctggtcttgaagtcctgacctcaagtgatctgcctgcctcagcctaccaaagtgctgggattacaggcaagagccgcctcaaactgccatcattgtgattttgatttgcaattctttgatgataagtgaggttgagtattattttcatatacttgttagctatttgtatgtcttcttttgagaaatttctagtcagatcttttgctcattttaaaatcggagtttttttattgagttgagttccttatttattctggttatttatcttttgtcagatggatatttgcaaatgttttctcccattctgtaagtcgtaatttaattttattgattatttcctttgcagtaaagaagcttttttatttgatccaataacatgtaatttttttgtttgtttctttttgcttttgttatctgtgcttttgaggtcttactaaaaaaatctttgccaagatcaaacttgtccaacccgcagcctatgggccacatgcagctcaggatggctttgaatatggcccagtacaaatttgtaaactttcttaaaacattatgaaatttattggcaatttttgtttagctcatcagctatcttaagtgttagtgtattcaatgtgtggcccaaggtaattcttccaatgtggcctagccaaaagattgtatacctctggattagatcaatgtcctgaaacatttattcagtgttttcttctagtagtttcagagttttaggtcttacatgtaaggtcttacacttaagtctttaatccattatatttgatttttgtatatggtgagagaatgggtctagtttctttcttctgcacatggttatccaattttcccatcaccacttattgaagagactgtactttacctaatgtgtgttcttggtgcctttgtcaaaaatgagttggctataaatgcatggagttatttctgggttctctattctgttcccttggccagtgtgtttgtttttatgccagtactatgttgttttgattactgtcaggttccaacctgagctggggtctgaggggacaggtggcaggtggctaaaagaacactcaagggaccataggcagttgggaaatggtgttattctcttcccctcctatagagtcagctgtgcagttatatttctcacagacaacagtggctcaaagccagatacgagctcacacaaacaggttacattaaatggctacaaatgtgattacatagtgcgcggaattgtgcgcctgcactacaaacccactgtgtcatgctgtaccagatgtctgcctcagccttctcctgaccaaagcacagccactttccttacgctccaccctctaggctaagggagttctcctagcagggagacatgcccacagggcagaaacctggacacagaggccacagcagcaatacagggagcaacaactcactactagtattcctgctatgctgcccatgattattagggtccagcataggccagagcccagagacacccaccatgtctatggggggtcatcagtaaggctgtcagctgccttgatttcctgggaaactccttgcaaagctgctatgttttgttgattgtcagggatgaaggtacaacattgcattcccaaaacagcacagatgccaccttgggcagcaatcaatatgtaggcctatcaggttctgcactaccactttcctggtttgatcaacatcatctgtcaacagaaggaggacaacttgggtgtaattcaagtctcaagtgttatgctctggaagggccataacttgcatttctacagttacgacacctgctccagggatggttaatgctaagaggtagagccaccagggggctcatcacacttgcaaaaaccaggaacgtagcaccttccagttatgtgggcatctaaggaatgtggaaataactgtggcaagcacataaggccacccccaggtagagcggccaatcctgtttgctggcaaatatgaccatactgtgtctccacagtcccataaactcccagggggcacaaagtcctctggggcccagccttgatgtggtcacctattccatcacacctttggtgtggtgataacatattatatgtgttcagactatggcagacaaccaccccacggtgacattaccccagtgttgctctacacatcatgatacctgtgttaggggcaccttgtgttctcccactaacgagccccatccatcacagacattacaggtcagccaggaagcaagcatgccatgggttttgtggcatcccctatccaaagctgcccatgttgcattctaaacgtcagccatggaactcctagtgtccatccatgtccagttttccacagaagctggatgtatgtgccagggcaagacatcccctgctgctgcttgaagggtggtgcagatccaacggttggacacattggtcaactcatcgtaggtgtgggaccattccacaatgctgttggagcatgtcaacctatggtctaaatgacaaagtaggcacaggtactaacaggggtaaatcatgcccttcaggcaaaatacaggccaagctttcatctctagataacaatgcaactgcaaaggacttctgccctgggtgatggtaccacaacttttcagcaccccatggttcctttgggtctatatcttgccagagttactggggagctcataataggccacacaggaaatacagatgttccctggagacttccttccctggccattcccctatgaatggtcaatcatagaggccatatattaagtacccaatgagtgacatgtaaatcatactataggctctccctgcaagggactatgatagccaaccatacgtcatggtggacttggagggtctgtggccaaagccaggttttttgttcccctgcctttacagacattggggcaggcaacaacagattaccattgtccccatacctggttggaggaagtcatctttggtgtgcatctgtaagtggatggggtcagtggcacagtgtagcagtgcctctactggggcctggctgccttttcatggccgctcattcaagctttggagcaccaggtccaaccttgaactctagccccacaaagaggtggagtaacatgcaaatgtaacttatttttcaggagtcccttatatcactcaataataccagtagtttgtgggttatatggaacctccactttatgtccatccattgtgcccactgttgtacgtgctatccaggaaaatgtgttcccctatcacattcaacagtcaggggatgactgtatagggcacacaagtgttgcagggcctgaattgtatgttgttggttggccatcctgcaagggtaggcaaacagcagactggtggccgtgtctacagctgtcagcacatgcatatgcccctgcaacctcagcagtgacctgatgtagtctatttgccatctagtcaagagcatccaccctactgtcacttgttgtgtaacattgggcagctgtctctgtctggggtatgtctgtgtccacgctgggcatttctggcagacctcccagatatcttacatagacaaagatagaccatagcacttattgacctattccattagtttactcccgacgtggcccaatttctgctgcagccatagagctacatctcgtgtaggtgctgactccaaccaccggacctggccaaggcatttgcctcatcattgcccagggcagtgaaaggcacatgtcctgacacatgataaatagttacaacctttcgatggcccatttcccataggtctggccacatggcctggccccaaatgggcctgtgaccaactagctaattctgtaactttcaggtagttaaccacaaggttagggcttaataaactgcccagctaccagtgaagattaccataggtgtctcctccttagtgatcaccatccacagtgccctgagttcaacctattgactactttgtccaggtattaaaccatatggtatcagtactaggctggaccatgacagcagtccaggcagcagtagcaccctggctggacccatcctgtctaccatgcctcatcaggaatgggaggtgcctctcttgaaatggtaatggctcagtgtttaggggcgcctcaggctgacccatggccttatcttgcatcaggactacaggtcccaagacttcttataattctgctgataaggggcttgtactcagggtactctgctgttctaagtaggagccccactttgctaaggtggatatctctgccatcccagtctggggttcattacccatgaacatacttgctccccaactattgggtaagttgtccacacaatgactgtagcccttcctgtcacactctcacaagcctgaagggtggcatatacagttgttaattccttctctatccatgaatagcagagctcacctccattccaaagttgggaccaaaagcctacttgtgttctacagtgctctctgcactgccataggccccagccaaaaccttctgtggtcacatgcacatcaagttcaaatgggtgccccaggtcaattacttgtagcacctgcacttgctgtatggcccatttggctgccagaaaagccatctcagcctcattgtcccaatcccaagtaattcctgtttttgtcaactgatacaatggttttgttttctgagccaaatggagcacaaatgctttccaatatcccaagaggctcacaaaagtctctagttgcctcattattgtggtctggggatatgcctgaattttattaatgatggcctctggtatggcgttcgtcttacccaaccagataactcccaaaactttggcagacaatccaggcctttggaccttgttttcattcacagccaaactgcatgctgccaaatgttgctgtaggaggggtgccgctatttctaaatctgcaagagaatcagaggttaacataatatcatccatataatggaaaaggtggaccccctttatgacatatggtgggtttatgcacacagccctgcagcaacaccgtgaaagtctattgtcgccctttccatgtgaagacaaactgttcctggctctctggtgtgatgtcaattgggaagaatgtatgggccaagtccatcacacagtggtactgtcccaattccatcatcaagtgatccatcaaatccgtgatagacagcacagctgcatgtgaagggggtgttactttatttagttctcgaacatccaccatcatcttccaagttccgtcaggctttctgactggccataccagagaattgtagggtttgtgcattccatgcactatctgcacctcctctaacatcttactagtctcagttatcgccatatggccacctggaaagtggtattgatgggtggaagtaacctgtcggggttgtggcaggacctggggccagtgatacgtatgtccacccgataatggctcaaccacatgtatttggagtctgaattctctgaccgtggcttgtaaaaccaagctgtgaaaaatatctaccctggaatgtattcaagtatggaggagatatacacagtttataagcatgcagccaagtgcctgaggccaaggtgcaaagatgcaggcttcactcccactgactggcctctgtctatgtatgcaaccttgcctggaaacttatccgggttcccatagatgaggctacaatctgtgccaatgtctaccagcagcagcacctgctgtacattggtgggagaccagtggactgccaattccacatgtggcctcctgttgtctggtgtccccccaagctgggcaccttgaccagtttcctaatcaaacacaaaacgctctataccttcacccatctgcaagtagtccttgagctggagcatctgggtgggacatggtcaagcagcatcatcccgcccgctgttgggcattttctggaattggtgattcagggacaattgcctccacaaagttaacagcacttcattgggttgcctctcagttttctctcggtcaaccccagccaaaatcaaaccaatccacatatgtgtatgagtcaccactggggcccttttgtcccatgagatggccccctgcagaaggagtaccttccccctttttatggcatagactcctctgcttccccgagggctgccatggcagtagtcacctcatgtatgcagcaccctgcacacagattgacagtggccagggagccaaaggcactcaggggtgcagagcacaacacaaggtccctcatgtgggaggtaaggtgttcatcatctggccctcgggtattcggatcaaacatagcctgctgcatacccatctcctgaattacctgcaccacatctgtttatgactgccatttactcacagtttctggtatttctctggcatagtcccacaccatttgcatggcctccatcagccattcaattatggtgtggttgccttgcccctgtgctaaccacttgctcacctgcaattgctgatggagggagggatgagtcataatggaggccaacttttccatctcagaggaggagcagacaatactgttggctccctcatcccaaaggcgaagcatctaggtgggtaggatttcccccaagcgctgccagcactgtttactttattcccacaactccgttggggtataggcagtgtatgacttgtgctccatcatggtaggaggtctctgagcccacccctggggcctcaatgacttcctggtgtattttctgatgagccactgggggagcccacaacagaggttcttcctcctcggtgtcagatcgggcaggggtctctgactggggtggcaggcccaagcctacactaatagcagcctctaattctcactccaacctgtgtacgtcggccttcaggctctctgcttgtgcctggaggtcccttacctgtgctgcatcctgcagggactgagcatgcacttcccatagcacagtcaaaaatgcccatccaattctgctgggaaaggcacactccttctcagtgctctgtgcttccaggtgcttcagtgccttatccatgcacacaggggacctgtccaccaccacccatgtctccaccagggcccatcttagcagcatggctgtcactgggtaccataacccatattggggccacacggctgacctaggatcatcaggggccaagggctcactcacctcggaatcctgctgactacaccaattgtcaagttccagttcccagactaagctggggtctgaggggagctggtgaacaggtggcaggcagctgaaaaacactcaagggaccacaggcagttgggacatggctttattctctccccctcctacagagtcagcagtgcagttatatttctcatagacaacagtagttcaaggccagatatgaactcaaacaggttacattaaatggctacataaatgtgattatatagtgcatgggattgtgtgcctgcactccaaacctgctgtgtcgtgctgtactggatgtctgccttggcctactcatgactaaagcacagccatattcattacaattactagggctttgtagtatactttgaggtcaggtagtgtgatgtttccagctttgccaattgtgctcatggttgctttggctattcagtattgtttgtggtcccatgtacattttagggttgctttttctatttctgtgaagaatgtaattggtattttgatagggactgcattccatccttgatcattttagatattttcatcattttaacaatattaattcttgcaatccacagatatgggatatctttccattttagggggtttgttcttcaatttcttttgtcagtataattttatttgtagagatccttcacttttttgtttatatttattcccaggtattttttttttcttgtagctattgtaaatggggttgctttcttgatttctttttcagattgtttgctgttggtgtacataaatgctactgagttttgtatttaatttttgtataataaaactgtactaattttgtttatcagctgtactagttttggggtggtctttaggtttttcttttttctttgtttttgagagggagtctcgctctgtcacccagcctggagtgcagtggcctgatctcggctcactgcaagctccacctcccgggttcacaccattctcctgcctcagcctcctgagtagctgggaccacaggtgcccatcaccatgcccagctaatttttgtattttttttagtagagacagggtttcaccatgttagccaggaaggtcttgatctcctgacctcgtgatccaccctcctcagcctcccaaagtgctgggattacaggcatgtgccactgcacccagccaggtttttcttaatataagattgtgccatctgtgaacaggagtattttgatttcttcattcccagtttggatgatctttatttctttctcaaacctaattgctctggctagtacttacctagtagtatgttgaataaaagtagtgaaagcggttaaccttgttgttccagatctcaaaggaaagggtttcaatttttctccatttagtatgacaatagctatgggtttgtcacgtaaggctttattgttttgaagtatgttccttctataccaagattgttgagagcttttatcctgaaagggtgtattatatcaaatacttttttagcatctatggaaataaacatttttttaaaaattctgttaatatgatgtatcacatttacagatttaaatatgttgaaccatctttgcatcactgggatgaatctcatttgatcatgatgaatgatctttttaatatgttattgaattatgtttgctagtattttgttgagaattttgcattttattcattatgaatattgacctgcactttccttttttgtgttgtccttgcatggatttggtatcagcataattctggcctcataaaatgagtttggaagtatttcatcctcttaaatattttttgaagagtttgagtagaattgttattggttcttctttaaaaatttggtagagttcagcagttctcattaagtcctgggtttttatatgggaggctttttattactgcttcaactgccttattcaatattggtctgttcagatgttctatttcctcatatttcaatcttggtaagttgtatgtacctatgaattttttctttgaatttttttgttgaaggttttctgatttgttggaatatagttgttataatatgctataatcatcctttgtattttgtgatgtcattaaatacaaagctgtaatgtctcctttttcattttttattttatttatttaggtcttcttttttttcttccttagtctacctaaagctttgtcaattttgattatctgtttttaaaaatcaacttttcattttgttgatcttttgtatgtttttagtctcgatttcatttatttattctctgaactttatgatttcttgcctcatactaattttgggtttggtttattcttgcctttccagtttctctacatgtatcattaggcagcttatttgaagctttaccacttttttttatgtagatgttcattgctataaattttccctttagtactgcttttgctgtatcccataggttttggtatgttgtttttacattttctcttgtttcttttttttttcaaattgtcctaactttttcattggcccattggttatttaagagcatgttgcttaattttcatatattcgtagagtttccaaggtttttcttattattgatttatgattttttccattgtggtcggaaaagatatttaatacttgactgttttaaatttgttgagacattgagacatgttttgtggcctaatatattatctaccctacaaagtattccatgtactgatgggaagaatgtgtattatgcagccgttggataaaatcttctttaaaagtcatttaggtccatttgctctataattttgtttaactccaatatttgttcattaattttctgtctggatgatctgtccattactggtagggggttattgatgtcttgtactattattttattgtggtgtatatgtccatttagatctactaatatttgtttaaatatgaggcactgttgtgttgattacctatatatttacaattgttatatcctcttgctgaattgacccttttataattacatagtgatcttctttgtgtctttttacagttttttacttgaagtctatttttatctgatataagtatagctattcctgctttttgtttgtttgtctccatttacttggaaacttttgccatttattcacttttatcctatttgtgtctttataggtgaagtgagtttcttgttagaagtatatagttatataattggatcttttaaaaaatatattcatctaccctctatcttttaattggagaattttccatttacattcaatgttactttttataggtaaggacttactactgccatttggttatttgttttctgatgttttgtaactcctcttggcatttcttccttcttaccatcttccgtttgggtttagtaatttttctctggtagtatgttttgattccttgctttttattttgtgtgtctcttataccatgaagcttataaaaaatcttatagctatataaagctcttttaaacaaacaacaattaactttgataacaaagaaaagatacagaaacaaagaaaactataaaacgatctttgaacttcatccccccagcatattgacctttttgttgtctcagtttggatctttttatatctcttaacaagttctcatagttattatttttaaaaatttgtgttttagtcttcatactatagatatgagtggttttcacattgcaatgacagtgttagagtattctgaatttgtctgtgtacttacttttatctgtgagtctatacattaagatgttgtttaactgcatattagtgtctttttcttttaaactgaaaaattcattttattatttcttttaagaaagggtctggtcttggtgaatttcctcagcttccgttttctgggaaaagctcctcattccttcaggtttgaaggatacttttactgagtatagtatgttttgtttagcaagttttttacttcagtactttttatatatcctttttttaacttcagtactttttatatatcattccattccacctggcctggttttcactgagaatcactgagatttcactgagaaatctgttttcagattgatcagagctcctttttatattatttggttattttctctttccactttaggattctctctttgccttgatatttcactgtttgactattatatgacctgggatagtatcatttgggttgtatttacttagtgatacttgacctttctgtacctggatatatctatttttctctgggtttgcaaagttttctttatttctgtgaatactctttcttctccttgctttctctcaaccccctcttgaaggaaaatgactcttacatttgctctttaaaggctattctctagatctcataggcgttctttgtttctttccattatttttctcctgtgactctattttcaagtagcttgtcttttagttcactgattctttcctctggttgatcagtcctgctgctgagactctctgatgcatttttcatctaattcaatgtattctttagttccaggatttctgtttgatatttttaatgactttaatctatttgttgaatttctgtaataaatttctgaattgcttttctgtgttttctgggagctcatcaaagagttttgttttttttttcttccagtaactcaactcataccatctcattagggtcaatcactagtttctttctttgtacatttgaggtggccacggttgtgttgtttcttatatatgtacatctatattcttgcattgaataattggttatttattgtagtctttgccttctggcttggttagatcttcctggattatatctgcttagaggtgtactgtatagtttacttgttgaattctcttaactttagattgtggccttcttattagcattacatgtcacctcaatcctaggtttgccagggctcttgcaaaagcttggggtgctgcttttctttaatgggatgggtttcccaaatggaatatcccagctatgtgaaaaggctgtctatgggttcatgccaagaggatccatggagtatgcctctcattgtatggtgctgctgaactgcctttctgttttagtatttctgtagagacagcctctaaatttttcacactatggttgcaagcccctctttgattcttggttctagctgtactctactttctttttttcctcctacaggctttcaaaatgcttcccaacacatcttgcattaagacaagaattaacttactgcagaggaatccaagataatagagaagctggctgcctactctgatctcatttttccagtgagacacatatgtgtgaggggaacttttctgcatagtgcttggcatcatgcatacagaaatgtgtttatcttagtgtctgttcacaatttatcatttgtttgtggccctatggattttcacagcctaagttttgagttttgggatattactggtgatagtcttggtgccaaacagttgtttcagttttaattttgtgaaggagagtgatgccaaattgttgctgctccatcattttggtgatatcacccacttttgttgctcttcctattaataaggaatcttaagagcacgctagaatattgaggaacaaagacaatgttaactgctaggcaatatagatttattggatgcccaataactaaataccttgaccccaatgggaatttgtagttcttattgtcagaaaaccactggtcctatggaaaactaagtatgagctgattccctccaaatcatgaggtgtgaggtgggggcaatcgtagctggctcattgtccaagaaatccagagtgaaatcctatgatcacttttagacaattctgtttattgacatatcattaatcattatagattcctatctcaatatgtcagtaaaattgctgtactgggactatataaactattattcaaatgtaagtatataatatactaatgacagcttgaatcaccttctacgatagctgaagtagatcatcataatcttaacaccacattttttttctatgcattgatctatacatgacaactctcatttccactgcaatttcaacatgagagaaaaagtaatgagacagagtagctgtgttctggttagaggcgcagacaaagcagtttcaagagactctttactatcatgggtagcaattaaatgtgcaatggtcaatatggtcagtaatgggggaaaaaagcacatggtgccagattgagccaaccattgtgtacaaccattgtaagaaagagaaatttatctatgtttttctgattcatgcattggtacacacatttacagaccagaatataactctagaaattggcagctattttaatgcttccaatggtctgtttttgttaaatgaaaaaggtaatgcaagaatctattttagttatttaaaataaattttcctcatatggaagttgaatgttttacagcaggatggtctgggaatgggcattttgcggcagtattgaattttcatatgttatagttatgtagcaagtgagttcatcatgtcaggagggagtataagttcatctccttattagtctatgtctgtaatctatacgactattaaagctaatatttctcttgactctgcaactaacccctgaagagaaaaagtcatctggccaaatcccaaaacactcctgaatgcattagggtagattatgaacatgtagatgaaatacaaggtttatgaatctcccctctgttgcctgaaccccctttcccttgccacgcttctttgcttttctgacagtattttattggctataaatgaaattcaaacagtgccccaaaacgaaactccttcgcaaaatctttcttgcagtgaaaataactgtatgcacagtaatttaatcctcttcttcaaaaattgatacatattacagtagtcctcccttatccacggtttcattctcagagttttagttacccatggccaactgcagttcaaatatattaaatggaaaattccagtaaaaacaattcataagttttaaatcctatgctgctctaagcacggtgatgaactctggtgtcatcttgctctgtcccatacagaccataaatcatccctttgttcagtgtatccacactgtacaggccacctgcctgttttcacttggtaagcatcttggttatcagatcaaaggaacgtagtatatatagggttctctactatccatggtttcagatccactgggggtcttggtatgtatcccccacagataacagttgactactgcattaaaattaatccactattaggtaataaaaacttggtgaagaggatcatgagatttaattgtcaggagactcccctgaagaagtgacatttcagctgaaacttgaatgacacttaggtattgatgttggagaagagtaatctagcacaataaaatataaagtgggaaggtggaggtaagtttagcatcagaaaatgtctgatgtggcttgaatgtggaatggacagtgaatgggataagaaggttgacatagcacagatcatggagagactcagggacttgtttggatttaattctgaaagtaactggaagccatcgggagatataggcagttgagtgatataatttaatttgtattttaaaagatcactttggcaggtttgtaaagaaaggattgtctgatgggcattaatggaagcagagaccactccaggaactctggaattagttcaattgatagcacaaaacaacagagaggtggttagcagccatgcagatggagagaactggcctgagttaggatattttggagacatacaaaatgattttgatactatttagcagctgcataatagcccattatatgaatgcgccatgacttatttaaacattggaagaggcgctttcaaatttaagcaatcaagtgtattctgagatctactattaagattcctgcttcccaaattgtcttcatttacatttacccagtaactatctatttaaaacgcataaggtggtaccctggctgtactaaagaataataaatagttccattcacccttgctttttaaactatgacccatttcagttcagttttaatttttgagtaagaattagtataatatatgaaaagcattctgtatgcagttccaatatatattcaagttaccatagaattgaacgttatcatttcatgggatttttgtttttagttttgagtagaacaggcttgaaaaaaatataagaatacctgtaggaatcagatgatatttgataattgaacagctctttggttttaattcaaaattaaactccgaagaataagaataacttaaataaaccaataaagtttggctatgcaattcagagctcaacttaaaaagttacgcatccagtaaatttttcagtaggctgttcatttttatgctaattattaagtttcattctattcattaaaatgttaaactttatcctgagtcacctaaatcttccatgagctctgcatgtagaaaataatttggcagatgcttatttggaggaaattgcttacttcttaatacaacttttttttgagagaggaaaatattagcaaaaaatttttatgtccctaaaaattcaaacattttgatcatgagtaggagcataaacagagtgtatcatatacagttggaataaaaccttagatgcatgcaactcaaatggaatgaatgattccaactcatatgcttgttaggattcaatcaactctcagtcattcactgagttgagttacaagtagaagagagtgggtaatgttaaagacacactgcacaattcttgtttataatatggctttaaaatctagttgggaagacaagaccacatgttggtgcttttgtgatttttgcatgctgttccttctgcatggaatgactttctttaacttcgtggccacacagttgctaattatctttcaatctgtcagtatcacatctgtgaaggttttctttctacattaaacagtttataataatcgttgttatgcttttttggattcacatgtctgcatctctaaacgagcgtgtgttccttcaggaaaatgactatgtcatgtccggagtgcttggtgtaatgtcttatacagtgttggaccatcattaatattgagtattgataatataaggcagtttgctgtgaattctaaatgtctagatctatcgagaagtgtttagggaaatttgtatctctcaagagaacaagatcaccagggcctctaatcctggtattagaattacaatcagggcaaatcctgaaccatttgaggcttgagaagagggaacagatgagggaggaaggatgggttggggaagtcttcaagagtttttcaactctactaatctttggttctacatttcaaagtttgaattttaaaatagctctattacctatataaccattactttgtggtctaaaagtaaaaccataaaatcagcttagcacaacagaatgtactggactgaggcattcacattcagtcaatttttcacagtataactcagaaagaggttaaaaagttctctttgctttttgagaacccattttgtagttcattgttgcagattgtctgatgttgactttcagaagtgaactgaaatgtatgagaaatctggaaatatggtaaagacaaggaatcaaagccaagaagcaaacagacacgcaggggaggatatttaccgcatcgtctcactgagcatacctggaaaactgagaagctggcttttgaatagtgcatatataatcagttctttggtctgtaaattcagtaatcatgaaaccccatgaattagtatcaacatagcagtacatgtcttcattaatattttgtatcattacctctgtagcctctctgaggaattcagggaattttatgggggaaaaaaaaccttaaaacttgaagcaactaaaatttatataaaaatcatacagaatgaatgaataaagtatattaaatatacaagctcttttcttagagacttagaatataaaatgaatacgaacccactttccccaataattagccttgatacacaagtaagcataagcacaatattttttcttgccaatttctacaatgacccaaaacctttaatgaataaaaaagatatatcctaactaattaaataattatagttgacaataactttattaggcaaaaaaatctactaattttcattgtctttttaaatattacagtattcgggcattgttatatatacattataaaatatatatctagatatctagatatattcatatatatatatatatatatatatcttgagataatatgaatgtaacatttcaaattaagatatacacctctgaagagaaaaatgacactcatcaccatggggaaagatagtaatagtagttaatcaacaaatgtgtgctgaattaaattgaatgaatgcaggatcctctaagtggttggtgaaactgttctggactctaagttcatttcctaagctagatactctatagatgacatatactgaacaatttctataatgcaactgcttcttcctaggtcgtctttttacagaatggaggaaatggccttttaattccacaatccactctggtagctataattatattgtttctttttataatgaagtagaaagatatagtacattacaaaaagaataaatttataatctaacaaactatgaactcttaagcaaccaactcttaactggtggaatctggaaagcgcttcttaaataaaaaagaaattctatcctggatgtctccagaaatgagttgtgttactctagcgccctcctacattaatgtaaaaagtagacaatgctgagctccgcagtttttgtgcagtttccagctttcaaagtaccagatagaactctgactccaacactttccatccttatattccccaaaatgtatatggcattttaattatccttcaaaaatcttgacttttctgacccttcatctcttcttagtagaggaacaagagttcaggaacaagtgtggagatgggggtggggtcaaagggaaagaaatgcaaaccagactcttacccaatgattacttcttaaataatatggtctgtaacagaggttgccaagcctttcctatatagaaccaaagagtaaatattttaagctctttaggatataaagtctctgtcacaactactcaactctgctaatgtatcataagagcagacacacacaatacataaatgaatgaatgtggctgtgtttccataaaactttacttactaaacaggtggtagtctgaatttggtctgcaggatatagtttgctgaccatggtttatagcataatctttgagtatagcatacaaaatatcattcagccgatttttttgtaccagaaatttccaaaatcaactgaataatttacttttttttcccttaaattactctacagtaatctctgtggaagaaggtgaactgcatttacaattgcttgaaatagtgagaaaagttacaaaaagaaactacaaatacaaaacaggcaatatctgataaaataaatacactctgtcactatgttaaacaccagaatttttgtatttctatagagaacaccccaactatcagacctttttgaagcattattcgcatttacattcaacaaatatttaacctaatccttataatcatccaccatttttcaaactttggaaatccagatttagaaagataaagcagacctcttaaataggaagtggcaaatctaagatctgaaccttgatcatctgcttccaaatcctgggctggttaagaaaaatattagatttaaaaaaatctaaaatacattcaaaggctttaattccgcctagtgtttttcagtgccagataattttgtaacaggcaattctcagtaattgtaaaacacacaaatgatgactttcactgtttttagtaataagagtaaatcaatgcaattctcagtcattttgcttaatggagcacattgaaaaacaaaagagctatactccctgtttttttctaatattttctgatgaatttcaatagctagactctcaccatactttaaagatcgtcattcttccttaaaagcaaaaggcaatttaatgagatacttgcagtagataaagttgccgtatttgatgtttccatgttttattttctgggagatgacacagaacaatgttgtctgagattgtgaatttccatacagagggatcattgaagcacccgtcgttcataaaacactctgtcatgctggagacaaaactatcaaattttattaaaacttagttatctcaagtcaagctttacatttccaaatagaaatagtgaactgcaatgtgtcagaactctaaatttcattaccacagcaggtgtcattatttggcacataggactagggtttgtgataactacatcatacaactccaaaggaaatagcagaaatgttctttgaaagcactcttctatgtctaagataataccatttttgagcagtccagcctaagaatgaaaaaatatatatagaaatactgaggtaaaggccatgatgattttcatattacccacaattaaagtttgaaattccaggaaagcatttttagatattatagtatcaggaaaatataaggaaagaaaattagctcaagatttccaatctgactttgtgctagcaaataatgttatgcaaaataatatctattattaatatataataatatctattatgttttaaaaaataaaataatatctattataattataatcccataattttttcttatctctggtaaaatatctgctctttatgttatctcaagtcaaattatacagtttagaaatgagtgagagatacttggaatcatctttcctcattcataggcatctcaaggaagaaatcataatagaatgatatctattattttattttgtagtgtttatttttattttataaaatttttccataatttattggggtaccggtagtatttgcttacatgagtaagttctttagtggtggtttgtgggatcctggcgcacccatcacctgagcagtatatactgcaccatctgtgttgtcctttatcccttgctcccttcccacgctttcccccaagtccccaaagtccattggttcattcttatgcttttttgtcctcatagcttagatagaatagccagatataaatttagatggctaaacatttatatatcatcagtaaaatttcggtccaattctcatttctaaaaattttggtactagagagcactctacttttatgattaaaaattttaagaatcttcctttaagacaaaatatgactccttttaatttttctccctggatccaatatccccttattgtataaaagagtgtccatttccttctcatggacaacctttaaaatatttaaataaaactaattttaaccgccaccaaccctcaatcatatcatgtccaaaataacctttccaacctccttaatctatttttttttacaataaggtttattatttccttttatcagtgcagttttggatgtgcaccatttaaaaaataaggtctttctttaaaaatgctcataaagtaaatagaataatacaaatatagtgtcaggaaggcaaattgtttctaatacgtcttttgacctaaatggtgaatgcctattgttaaagcttcagattattaaagtttcaacagcaaccctgtcgaactattggctaattccgataattttcaattaaatcaccaacattatttgtttttaatttgagttattatccagccaccagtctaattgatttcatatttgtgcaactgattttctaatagaaatatagtactttgttgttttctttttctattacatttaattttccttgttcctgtgcctttattcaagttgctgataaaaactctaatctgaaaagtccgagcaaaactctgtggcacattcccagtaagctaaattccagatgggcatcaagcattaatcaatatcccagggcatactattaaacctgttaaaactctaccaaactttttgccattctgctcacaagagtatcatgcgagtttgtcaaatgcctagttgaaacatagactcactatgtcgatggcccatatgaggcccataaagaaaattcagagctcttaaaaagttgctatgaatctgtaatcccataatttttccttatctctggtaaaatatctgctctttatcttacctcaagtcgtaccagagagtttagaaatgggtgagagacatcggggatcatcattcctcattcataggagtctcagggtagaaatcataatgaccatatttcatttttttttctatgtctgtgcccttgtgtgatagtagcatagttgcttgacagcatattgaagagtcttcattactcactgccattttctttcatgtcctagaagtgaaaaaatgttgtttggttccagttgaccacgattgtatctgatcttttcttctgttttatttgtttgtttcctaacagtttatgtttctcaacataaaatactatcgtcgtcatgccagactgctctctaggatcaccttgttttctcaccacaatgccttagaagggagcagagagctcagggtgtcactagtcagcttatatctcatctcatgttatttgaacaataggactctttaggagatataagaacattataaatacaaggtgcaaaatgtatgtaattatgacacctttttaaagtaaaccatagcaaatcacatgaaatagtgctttcttgatacaatattattatcgtttcttctacaaacattatttcagttaaggagagtgtgcaagggctctcctggctacctgagcaagcatttgaaagattcattatatttcctagggttaaaaactattttcctggagtttctaaaaatgagagcctgccataaaattgtgaagtttcatgggaaaagcaaagtaacttttaaacaactgaaatttttaactattttctagaataaaaagtatagaaggtcagtggatcacagctattgttttagctgaaaaaaaaacggaataagttgatcatggttaggtagattataattttattattacttggtaaaattgaattgtttgggccctggtaatcctcggctatttgtgtgtatagattaaagctcctggttctcacttaaccaaactgaaaagcactaattgtcagagaaagaaatgaagtttttttctagtgacttgttttcgaaacaacgccacttacatattttcatgttgtcacatttacatctgagaattattggtggaaaacacaaatggcataactattaaaaatgggtttctaatcataattcaacatgactttgcatcaaatagaaataccaaattgagaaaaggaaatgagtgtttgactaaataaatgtaatgaaatggtagtaaaagagtcaaaaattattctttgcattttctgtcttttcagtttatctatctatctatctatctatctatctatctatctatctatctctctatctatcatctatctatcatcttgatgtattgattcattgattgtggtaggcatgagcttattatgtaaaataagatatgtgcttcagtgacactgtttttgccaagaggtgttgctttgaggccttccatagcagcttcctgggcatctgggcattgatgggcttgcgaatgagctgagttggcagctgcggcactactggttgtagtcttgctagtatgctttcaactgtatccccttgggatatcagctcccttacctcatcagtgcagctctcacccatgataatgtttgtcataaatgtgacacaaatccagtccccatgctgtatctgcttatgttagccaatggagccacacagtggattagaataacgcacaaggacactggaggaagttgttcataagagacaaagagagcatatacagacagtggacatgaaacatttaattgagtgaagcttttttttctgatttgaaaataaatatatgttagggtaaaaaaaccaagcctgtaaaggaaaacagaaaaattggagttaataaagggacccacagcttcactactcaaagaaaactatcgctaaaatttgggttgcatgtaactctttctaatgtgcatatatgtgtatgaacaacatatttgatgatgtgcagtactttatttaaacttttgcctggtacattaggccattcttgcattgctataggaaattcctaagatcgagtaatttataaggaaatgtttaatttgcacacagttcttcatgctttacaggaagtgtggtgctgatatctgctaggcttctagggaggactcaggaagtttacatttatggtggaaggtgaaggaagggcagatgtgtcacatggcagaagcaggagcaagagtgagagtgaggacgtgccacacacatttcaatgactagatcttgtgagaactcactgtcacaaggacagcaccaaggggatggtgctcaaccattcctgagaaatcctcccccatgatccagtgacctccctccaggccccacctccaacactgaggattacaattcaacatgagatttgagtggggatgtacattcaaactgtgtcacctactattgtctgtttcgttcattccaattgtttgatctgataaataattctatagaagacagtgtaggctgaattgttcaaacattttgccatatttcaagttaagttcccagaagttgggtttattaaaatttaaatattttaagactcattacatatatacacaaactacatgataaaagagttatgtcagtttacgttgtgaccatgatacagtggatttaaaactttttattacatttctttttctttagtagagatgaagttttactatattgcccaggctggtctcaaattcctaggctcagtcagttctcccgcctcggcctcccaaagtgctgggattacaggccaccctgcctagccatgatatgatagtcttataataaaaaatccctctcacattttttttagaaaaaaaaatccctcctcttctttacaaaatatgtaatgatttgcctttattttacttgtccaatttctaacacagtccctattaagttagaaagctccacaattggaatcacataataaataatattaactaaatggcttaaaataacacaaggaaccccaagaagagagcttagattttatgtaagtattcagtagtcacctacttgtattccactaaattgtgaactccaaaaacagtgttttttatttaaagataaatttttattcaatacctgttttgtattaggcattttctcattttttgagaatgcaaaggaaagcaagatagaggatttcagctactatgcatgagacagcaaggcaaggggaccagttgaatatcaggctcaatgtcatatgtctggaatttatctttacacagatggtatttgtaagggtatatatagaccaaaaataaggtgagcttggaaattgatgatttcacattaattttctgcatgtcacatttgaggaatggattttactttaagaataaataatctcttgacagcctatgcatcagaatccatgtaggaaatagtgaattagtcatagttcaaagttgatcatctatttatttggatgttaatattaaatcataaaaatacaatattcgacaagtggataatgttattgctgggatgcttgaacaaaatgttcaattattttaaatgttatcaaatcatttaaaattgaaatttggaagttttatttccacaggagtaaaactgaatcatttaatgtgacaatgtccaggacagagtttcttaatcaaaaccctcgttagagaaatttaactccttatattacattttacggcttttgttttaattttatctaccactatagtcaatgataaaatgtgaataaatagaaagaaaaatattgtcattttattgtcttctttctattgatataattaccagagtcttctcaaagagggcattaaaaactctcttagggcactgaaagtcctttttactcggtttgaggtttcttaaaaggagtaaatgaaaaagtagggtagtggcttagagaaatccaccctggagaagacatgaacagaaaaataattacttataaatgggacaagttgatgtaaaatttgtaaagatgggttggagagttttggcaaaaatgtgagctctggaggaagcctgttgggttcaattcctgttctgtgcactgttctttcttttatattgttagttttctcaactgcaaagcagtgtaacacagtcgctatgattgctatgaaggttaaatgaaataagacgtgaagaccatttagcatacagtccaacaaatacaattgagatttataggctcagaagttaccattagtaatattcaagcacctggaaatctcacacttaatattaagaacaaataatgaaataggcctaaagactaagatgagttataattgtattatacttagtgcaataaattagacaaaccaggaatagagagattgttttactcttcaaagccttagaaagctatggctgtcacagaagctgttgaaattagtgaggatattatatgtcagtgggtaggagaggaaatgaaataagactggccacatagtcatcaatggtgtttagagtagccacattgtttcataagaacattcttgtcaacatatgagaactggagggtgaagattaaaaaaagagagagagacagtgatatgcaggatgagctcagttacaccgaatgctgactttatcacactgcagttacagaaaaggaagaaaaggccttagttaaaatataaataatatatcaagaaagcggaagcaaggttcagtgaaataaaacacaaaaatctaagaaaagattaaagggaagtatcttgatattgtgtatttttgaaagggctgggacaaaatgcattttggtgtacactgtaaagaaagataatgctaaaatcatagactaaataaatacatatgaaagtaaatttacacagaaaattagaagtatattttttgtttgttttcttatgcattttttatatggaccagcacagtctatagcatgtggtcccacttatgagaaacttcgtgtttatttgttcaatataaatgttttcaatttttttgtatgttaacaaagaaaaaatatatgaaagtaaaaggaagaaaagaaattactcaacataaattgggagatgattttttgtctctctgtgaagcagataaaatggtcagtatataacttcagtctctgtgtccagagcaggggttcctaacatgaggtcaatactcttgagattaaaatatttggtgtatgagatgatactctagggtgataattcagagctttcatctgattctcaagaacattgatgatccctttccttaaagctcagaaacaagcgatcgggagaaagataagtaaatgtgactaatgcatacatgaggcatgccatttgtatttatggattagcttttagtggtaatggtttagaggaaagcagtgctaagctcacatgggcaggaaagcaggcagcatactgaactggctaatattaaaatgtagggccgggtgcggtggctcatgtctgtaatcccagcactttgggagtctgaggcgggcagttcacgagatcaagagattgagaccatcctggccaacatggtgaaaccccgtctctactaaaaatacaaaaactagctgggcatagtagcacgtgcctgtaatcccagctactcaggaggctgaggcaggagaatttcttgaacccaggaggcagaggttgcagtgagccgagatcgtgccactgcactctagcctggtgacagaatgagactccgtctcaaaacaacaacaacaacaacaacaacaacaacaaatcagatacaaaggcatttctctgcaaaaggggaaattcctcttgtaaaacaaaaggaaactttataatgtactaaaaaatatggcaaagtgacagataaagaaagttgtcttccaaaataagcaatggggaaaggactccctattcaataaatggtgctgggataactggctagccatatgcagaaaattgaaactagaccctttcatttccccttattaaaaaatcaactcaagatggattaaagatgtaaatgtaaaatctaatactataaaagccctggaagataacctaggagataccattctggacataggacctggcaaagatttcatgatggtgacatcaaaagcaatgacagcaaaaacaaaaatggacaaattggacctaattaaactaaagatcttttattcaggggaaaaaaaaagagcaaagtaaacagacaatctacagaatgggagaaaatagttacaaactgtgcatccaacagcagtctaatatccgtaatctataaggggcttaaacaagtttacaggcaaaaaacaacctcattaaaaagtgggcaaaagacatgaacagaattttccaaagaaggcatacacgtggccaaaaggcaaatgaaaaatgctgaacatcactaatcattaaagaaatgcaaatcaaaactacaatgagataccatctcacatcagtcagaatggctattattaaaaagtcaaaaaataacagatgctggtgaggttgtagagaaaagggaatgcttatacactgctagtgggaatgcaaattagttcagctactgtagaaagtagtttgacggtttctcaaaaatttcaaaacagaattaccgttccatccagcaattccattattgcatgtatacccaaaggaatataagtcattctaccataaaggcacacgcacacatatgtgcgtcacaccactattcacactagcaaagacatggaatcaacctaaatgcccatcagcagtggactggataaagaaaatgtggtacacattttatacaccgtggaatactgtgcattcacaaaaaggaatgatcatgtcctttggagcaacaagctagaggccattgtcctaagcgaattgacacaggaacacaaaaccaaataccacatgttctcacttgtcagtgggagctaaacattgagtacatatgagcacaaaaaagggaatgacagagactgggggctacttgaggatggagggagggaggagcataaggatttaaaaactacctatttaggactatgcttattacctgattgacaaaataatctatacaccaaacccctgcgaacaaacaatttacatatgtaacaaacctgtacatgttcccctgaacctaaaataaaagttaaaaaataaagctgtcttccaaaggaaacctatggaagttctatacaaaggcaaagcatatatgaaatatatggtcttctaaatattcatgttaagataatcagtaaatgcctggaagacatagattggcttagaatgttataaaaatgctaataatttatagcttttgttttgttttgtattgaggcggagtctcgctcagttgcccaggctggagtgcaatggcatgatcaaggctgactgcaacctccgcctcccaggttcaagtgattctcctgcctcagcctcccaagtagcgggattacaggcacacacccccacgcccagctaatttttgtatttttagtagagacaggttttcaccatgttggccaggctggtttcgaactcctgacctcagatgatccacccgcttcagcctcccaaagtgctgggattagaggcatgagccaccatgccggccctatagcttgtttaaacaacataaacttcttgagcacatgggggaaagtacgtatgaagaagcagaaagagcactatttagttactgaagtgaaaaataatgaaatatcttggaatcaacttgaacaagatagggggaggtatgttgagaaagtattggcagtttccattaaaaaaagaaaaataaaaattacaatcttggcgataaagagctggaactagggaaaaatatttttaaaatttaaagaagtaatacaatatttacaattcaaaaaagtgaatatttacaatgaggagagaaatgaaaataaattatactttgattccttcttaacatgacaacaaaatctcaagattttcaaatgagaaaataggtaatttaggctttttttgcatggttcttcagaatttatgattgtagtattctacagaatatgctctcaaaatacagggatttcaataaattccatattgcatgattattataaaaatatggaaaagtgtgttgatgggggatgctaaagttctctgcttataattttatgcagcttattattagatttatccacagactagcttcaggctctgaacatttctaacttttttttctttccttcccactttcttctgaaacttggagtgttattgtataggacacaattttatgtgatatgactctcagaatatgacatctagcctcacaaccttatgtcacaacatggggtctgttggcacaacattctgtaagcgtatatttggaactcatttctatatcaaaatagctaacaatagcttaattctatatggaagtaactgcaaacaatttaacttcctcttactaaccgaaactaaatgtacccccacttaacattttgttactcagactctagaaatattatcagacactccaccaccacttgacacaaggaaaaggtcatagagggaattaagagcagaattggccaggcgtggtggatcaggcctgtaatcccagcactttgggaggccgaggcgggcggatcacaaggtcaggagttcgagaccagcctgaccaatgtgctgaaaccccatctctactaaaaaataaaaataaataaaaataaaaataaattagacaagtatggtggtgtgtgcctgtaatcccagctactcaggaggctgagggaggagaattgcttgaacccgggaggcagaggttgcagtgagcagagatcgcaccactgcactccagcttaggcgactgagggagagggagaccctgtctcaaaaaaaaaaaaaaaaaaaaaaaaaaaagctgaatcatacagccctctgaatcagttgcacttttctagaaattttgcaaaaattttatgaaaaacaaatgaccaagtgaacacctagtttcatacccaggactttaaaggtggtctatgcaagtgggaaatttgaagctcaaacattgtatatgcccacataaatctacctataggctaatgtctatttgtggataagggaatttagaaagactatccaaaaagttaaccatattatagaaaagatgaagataaagcaaccaagggaaaaacactggaaatataaacattatgagatgtaaagaaactttattttaacattagtcaatatgtccacttgtgtattgctgaagggagaactagagtcttaaagaaaaagtgattgttcctgatagaacaataatttattgcaaagtacacagtcttataaacactaccctttgctggaacatgataagatttgtgttcatggttcttcatattcactcttgctccagagtcaatcttgaaataaaaataagataattccagttcattttcagagtcctctcagtccatctgtgtcatttccctgtccctgaccccatctctggatcccattgctgttatgattccaagtggatgggagaccatcttcttggctttatgttgggcaagtttgcatgtaatattcagttttgtttgctctctctctactctgtttcaacccaagattgcaagctgtatttcttaacaattatttattaattatagataaaatactagatgttattggcaataacataagagtaacataaatattaaagttaagttagaaaagcattgaattaaaaatagtctatgtaaaattccaatcttgttaggaaaatcaggcctaaaacaaagttctacaaatgagtcctctgtcattttagatggtataagttaatttataatggaagtttgcattttatcagaggataatcaaatgactgacttgctgcatttgaaagccttctgatactaaaacagtctgtataggagaaaaatgggggaaagaaggacttcctggtgagagtaaaaatatagaattcaagcctacaaataaaattgaacttgatttttttctgtggatactttctcgtattctgggttaattttctttataatattttgaaaggaagtaaaatatgcagagtgccaaagacagcaacagaaacctcccatactcctgaggctttaggaacacctgtcatgaaagtgggtttggctgacgtaggaataacagtgatacaatatgagtgccttttatttttgacagtctctgcgtttatcaattgcaaatgtacggtgtatacagccagcaatttgtcaaagagtgttgtagaaatatgtctgacccacataaaaagaccctatgcgtagaaaagttttgtttatctgaactgtatgctcagtaatctaacggggaaataagaacaacaggtttctaatctttcttggccactgagaaaaggggcttcatatgttgtaaaatgcagttacatgctatctaaagtaataataaagattgttttcagtcctactcttaacttcctacaatttagacattaccagtagaattcttttctaaagttcctacgaagtcaatacctcctgtctgtctattgcatgctttacactcaggactagagtctaaatccaagctgagcaatttattgccattatgattttaggcaattagaattaaggttttcttccatagctcataaacaaaaatagtatcacttaatgattaggcataaaattgctgagatgtaatataagagaaatattttgcatgcatcctaaaattctatagttaatgtacacacacgctcatacacaattaggcgtgccatgtccatcttttctaataaaatgtagttttaatttttaaaaatgatacaatgtactttacctaacatgtatattttatatatatattatatatatatgatatatatcatatataatatattatattatatcatatataatatattatattatatcatatatcatatatatgatattatatcatatatcatatatatgatattatatcatatatattatatcatatatcatatatatgatattatatcatatatattatatattatattatataatgtatattatatatgatattatatcatatatattatatattatataatgcatattatatatgatattatataatgtatattatatatgatataatatatgatatatatattatatatgatataatatatgatatatatattatatacatggtcatggtaggttttcacgacaggcatgacactcaaatctcttaaaataatttttacttctttttaagtaatcaatcaacatttgtttatttaaactttaaactttctaattcgtattttttaaattaattgtaattgacaattgtataaatttatgggttgcaatgtgatttttttcaacttttgttttagatacaagggctacatattcatgtttgttacaagagtatatcgtgtgatgctgaggtttggggtacaattgaacctttcatccaggtagtgagtatggtacccaaaggatacttttctaaccctttccccctcccttgctgtccccacttgtagttcccattgtctattgttcccgtatttatgtccaaaaagtatgtgttaaaaaacggttcatctcacattgactgtattccctactttatgatcattcagtgtagatggatggagtttccttgatggtggcatttaattatgcttacaaagaaatgtgatgaaaattcaggttaaaagagaaaatatatgaaaggaattttcttcatcaggaacttcagcaaggtaagtattgtgctgcaacagcatgcaatcatccaatatccacgtttattttctcctttctccctcattctacaataatgagaaaaaagcagacacatgtgattcctaatccaatttaaagttttgccacctgatggtagattgttatttttgaaccacatttagcaaaggacagcaaattgcactcagaattacacaatattcactggaatctgtatctttcattctaagtcgtttttctttctgcaattgttcacttgttagaagcaatatctgccactacttatatacatagaagagagcagctgagagtaagcattagttccacatcattaatatgagtattaataataataaaggaaaccctttccaaatggggatttatgtttgagaattcagtattttagtccaaaggaagaaaaacaggaaagtttttgggcaggcttttctctacatttttaatgatgcattgggggagggtgaggcaataagagacacagagaagcaggtggaagggaagtaaggagggatgagaaaagcagagtactgactgttgactgctcactgctgcctcccccatgttccccccccaccaccatttttaaagactcatcatttgtagctttatggaaaagaaactaatgcatctagagcagaaaaaaataaataatgtacttgtatcacttgtttattgctgtgtgataaaacactccaagacatctctagtcacgttgcgtgaagggtcaaggacacacagggtcacattcattagacgctgtgattgtgaaaacgtaccacagataatatatttccccaaaatattaataaatgcaaaagagaatcatcaatatttttaatttgagaaaactctgtatttgcaaatagttcaaaagcatattttaatcaaataattatactagaacttaaccattaaaataatcccaaatatgaaattagctgtttttcaatagtgaatcttgtgtaaggtagaaagacatttatatttgaacggttaaaattattaccacaagtcccctaatgtttcataacctaaggcatggatttggggagaaaatcaacaatttatagtgctaggcaagccaacaatgatacagtagtaagttttgatagataagaaattttgttggattctgaaatatacatgacaatatctgtatcctatcaactttatgaatgtgtcctatttggagggagaaaaggtatttaggagataaatctgacacagaattactgtctattattataaatgttaaattaaaaaaagttttcaaaataagtatctgagaaaaatgaaattaatgcctattttaaaacattaaaatacctacattttaatctcctaaacatataatttctttctttattctggcaacatccttatttacttactaagtttgtatcaatgttaaagccttcaattaaaaaaaagtaaaattgtaaaaagagcctgtcatcatgcgagtcacagtctagtagagtcaggaaagtaaattagtaaaatatgtcacgtcagatggtgaacgccaaggagacaacacaagaaagggaggtgggaagctcttctggtggggaggccttgcgattttaagttgggtggtatgggaagatgtcactgagtagatggtatttaaataaaggactaaacaactgaaaaactaagccttattgttccctgggacagtgagcatttcaggcagagttggaagagcaaatgcaagtaagtgcctgaggtaggcattcattggccaggtttgagctataacaggccagtaagacttgggttgagttacgtgggggatattagcagcagatgacactggggagagagcaggcatagaggtaggtagattgaatgaaactacaatggctaggtaagtctttataagaattttggctgtcatgtgattgatgtgagacgctatggaagggatttgaacacaggaataacataatctgatttacatttgaaaaggattattctagtactatattgaaaatagatggtgagtcagaaaagaaaggaagaaatatccaagccagttaggaggctattagagtaatcatatgagagaccatggtagcctatgccacagtaatcgcaacaaaggtgatgagaagtaatctggttttggaaatatttacaaggtttggaaggaagagctaataggattatccagtatcttggatatgggctatattaatcaactttaatttatgtggccatgacaaacaacctcaagtctttccccaaatgtcagtaatttacaacaatgagcattgatttcttgctcaagttacataaagcagctgtgggtctggctctgctcacctgaaggtcagcctggagctgcttgacttgtgctcatgtttaccatgcatcctagaatccaggctgtaggagcagtttctatcacataaatgctctattcatggcacagggaggggtgccatagccacagtgggcaatcttcttaaaagtcctgtggagttaaggcataagtcacacctggttacattctgctgccccaagcaatgtggccaagcccatgtggctgggtggggacaaacacttctcctacgggaggtctctcaggtctctttatctgacagagaagggagcaagcatttggcaagcacaacacaatcttcaacattgcagacaacagaaatcaaggcttttctcctaacaaactagaaaaatgaagtcactgtccaccgagatgggaaagacaacaggtagaataagtttaaaagcagacaaaaaattgatgataatatgaaactgtgatgtgatattggaattattttaaacattatcataaaaatttattataaaatgtagaaaatctaagttatcaaaagtctgatcagttgtacaagtgacatgaaataaggtactaggtcattttcatttgaagtgaaataaccacccaattcagaacaattaacagggggtaatgaaaatacctgtattcatacacgtagcccattttaaagtcatataattattattcacagatcatcagctacatttaagggatggtgatattcaagctgtcttgtatttcacatctctaagtgtcataaatatttccctttactatagaaaaagcaaaccagtatcaaatcgacacagaatgattatcaacgtatatatcccttgtgtagatgtagtattctgcaacccctgtgtaagtcctttttcacaacgctatatcatgcttcttacagcacttaagctgctggtacatgggtttctgaagaatgaggaagggttaatcagcttttggcagagatcagcaaaatttgcaagcattttagcctctccatcaagactcataaaatattttggaaactacaggacaaaaaaccaacccatccaagcagaaaattaaaaagcaatctgccagttcaatggaattcaacctttgctaggctgcaaatgatggtaaaatggttaaatattcattcatgattacccagagacataaagctacggtagaaacatgaaaaaaaaaatacatagactatgggcaggtgggaaagaaaacaggactaaattgtgcatcttatggagcagtgctgtttgttttcttttaacctgatttctatcaagatgctgaagaactgtagatttagataagatgaggaagaagagggggatcatctctccaactcctggtttaaaagggacactcttttttctttttgcattgaatttttgcctaaaatttccttttattatagacgtgttctctttttcttgcttgagagtaaaatattccacaaagtcaccaatcatgaaagtcaagaaatgtttgttgtattgactgttaatttcctaaaagaaaaacaaaacaacagcaatagttgaataagggaagactgagtttattaagcctgtcatggtaaagaagagcacacctggacaaaggagtgccttgaaaagggaagtcagaggagggtgtttacacaggtgcagcttctgggctgagtgatttttaaggcgtcttgcaagacagagcactggataaggccaggcagagtttagaacttaatagctttggattggtgagcacagtgtggcaagagtgttaaagtgattacatgagcaaggtcttaatcttgacagctaagctgtttacttggttcatggccttatattccagaagcaagcagttaaattatctttattggattcagtattgtttaatatagggtcagagaatggtgtccgtttcaatgttctgttgagagtttacctatcttgtgaagttttgggagaaaacttcaaccaagtttagagatatctgctccatgtcccaaacttcccagataagggagattactctggtatcattctctgccagacatcacatcaagaaataacagaagctgaaactggaattacattataatccataaaaggctgataacagaaagaagtattacaatgaccctgtcttcttcagaagatccaataaaaaggctatgcaagactgcagaagttactacctctaatttcttggcttccatacatatcattttatttcttttctggcctatgagtcccaaaatgtggcatagatattgactccaaagagaggaagtgattaaaatctacccccattggttagaagctggccattaccaatactcctggtatagcataaaaatgcctcaaacaatacggcatgcagtactgctctttgagggctagtgccaattaagggaacttgcatacttctgtttcttttatttttaacttactgttagaaaaatgttaactaaatttttgaggggaaatgttgtcattacagaatgcgtgtttcattatgcatatcctattggtgaataatttgcaaatcctcatttgacctaaggagtgtttgattgtcaagctttatatccccaaattgccatcaagcagataacttgtctctatcatttttatttttgatagcaatttttctgactctaagaaacctataaagcataattgttctaaaatatctccactattaatccttttagtctcattttttcagaacatactgaaacagaaatagtctgtcacctctgcctccacctgcttttcttcttcctccttgtacttcagagctaaggaatgaatacagaatttattctctcaggagagtgaaacaattgatccagtaattgccatgtcaagggttttggtgagagaagtattctaaaatcacaatataatgcaagtctcataaaggatttcctaaacagtatgttgctctccctactgaataaaatatacctcatcctacatttcctccttgaggtctaataaggagagacctatctggtctatggatttaacactctaagataatttactttggacaaagatctttggagaagcttcattatattttgaagtcattaacatgactcaagaaagtccccaattaaatgaagatgagtcatatgacagtaggcaactgtagatagtctctgcccctacattttgcctctgtagaaatattctttacattcatgggcttccataggcctgatgttttcctatttttgttgttattctgcttcattactgcaaatgtcagacctttaagagtgaggttattaaacagcaaaacacagagcaataggcatttgtaaaagatatatatccagggaagatgctgctctcccactgccagccatacaagctgaggcttccttctcatcactgaagaagacaaggagacaagaagcacattatgtcataaaggcaataggaatcttgcaagtaaccttttcaccagaaaacctctcatttgccctgccttgcatgtactgttcttgaatgatttattgccaaaatattcttgaatttcccatattgttaatttaatgttcttagtaacaaaaactaaccgtgggattgatataacagaaaattccagtcacctcagggcagaaattattattttaatctagccatgaaaataaacattttttttcaggaaactcaagtccttaaaaatgaggtgaagtgtgtctaccacaaagtgtcggcaagccagggaaagtcaggcagggtgttcaaggaaattaaacacatccagcttcttttttctactgtcttcttgtttagttcttctaaaaatcagttttgatggggagctctggcaaatgtttgtgttccgttagtttaatgtgatagaggaaaaaacattctggctggcagctaggctataaggggagtgctgagatttgaaacagaaaccacaatttataaaacgactgcaataagacttgtaaaacacataaattatagcaaaccacacaagaatcacagatgatctaagaatatactctttaacaccagctcatttagatctacatgttccaaggtaagaacacaaataaactaatctggcagaaaccatctagacttgtgttctaaagacaactgttccagtaaatcctctttatttgaaaattcagaccaatccctgctaaggccatcttatcaggtaattttggcccctaaactctaaaggtatccttccctgactctctcctttagagacccccccttacttcctgtgatatgcattctccctgtcaagcattttaataagtctgactttaactgtaatggtgttggttgctcttagctggaaggctttaacttaaaataccaggaagattagagagataactataagtaaaaatcatctaggttatgataaataagctgttgaattacatgacttgtttctaggatttttctctaaacatgtattaagtcaaactttctccaatttggagtgaagttaatgatatcttttaaagcttctctatagaagcagagagtagaatggtgattaccaaaggctgggaagaggggatgggagttggggagatgttggtcaaaggatacaaaatttcagtcaaataagaagaataaattcaagaaatgtattgtaccacatgatgactatagttaataataatgtagtattcttgaaaatggttgagtagattttaaatgttcttgccacaaaaaatgataaaactatgtcagataatgcaatgttaattacccaaatgcaaccattgcactatacatatacatatataaacatcatattgcacttaataaattttttttatttaaataagtaaataattttttaagaaaaactctccaggtgattctaatgttcaaccaaatatgagaaagtataagttaaaatattaacacctttcaataaaacattttttaaattacatgatgaattacatatataaaatggataggtccatggtgagtgactttgacatacataaacctcagtcaaggtataccccatacccaagaacattccctcattcccctttccattcagccccctcccataagtaaggattgtttttctagcaccatagattagttttgcctgttcttgaccttcatgtgagtgaaatcacacaccagagcggttgttaaagatgactgacatgagatccaaaaatgtcaacctagaatgaaagggcttcagctttgagaagctcttcagatacatttcactgtaataccctaattttccacttgagatcaacaagatcacacagctagttgatggcatagttgtgaacaaattcattgtttcctaaaccctctttactgatattccttctgtcattcatcaacatgttgataagtagcaactaaactataaacttcaaaatatatctaaaacctcaatttttactgcttctcctttagttcaggcctgatgaactacttaactaaactttccagacaaacttccagactggtctctgtctttagattcttacttatttattcattcattaaaaaaccactccttgggaattcatagtctaatgaacctcattttgcagtccactcctgactttattacacagatctgattatgaagtcttcattggttttaattatcagggttacaaatatgtgggctgctgactaaaggcaatccacagagctgatttttccttctcataaaattagtttaaaaattaaattacttgctaataattaaaactgggacaattctgagtgataatttagtaccctgagttttcttgaaacataagaatgtctaataacacagagttctcacttttcttctgtaatcactggaaactgaggagtgaatatgttctttagtttattacagctgcaacaagtgactcactgtgtttctgacaatgtggccacatgcagccacacttcatttatctgtcaccttcttacctatttaggcattttacattttcaccctagttttctgagatgaagtctaaattctttgtccaggcaagtgaggcctttgcctttaacagcacactttccgctacatcttactgaattatatccagcctaaaacagttgttcttccctgagtaacaaaatatgaatgataacactattttgattggaaatctaacaattttgcttttcttctcttttttcccccatagaaataaggaatagttgtattttcccttacttcttgggatggcatcctcacccccatgaggaaagataactaggatctcagttgattaggctttaaagttaataggaaattagagtctatatttaaagaacaagaaaagcagggcctttatcacaagaagcagagtgccttgaaggagttgatattaagcaggttgtgtttcttttgcctgctgagccgggctctagtagaccaatagtgaaaatgtggttcttgctaaggaagattgcaaaccagtctcagagacggataagtcactagatagtgttgacagtataggaatcatcacagggtactcttgtagcataggagggagtagtatatactagaggacctgccatctggactagaggaagttatttctaagtgtctgaaacttaggcctgaagagctagtacatatatgagtaagcaaagcaaaaaggtgtttaggcaggggaaatctcaaagataaatggatagctcaccaattcaaggtatctttggggtagtttaccatagtcacagagaagctcaggtaggagggagtatggaaagtcaatgattaggggatttggagaaaaattgagtggaacagaggtagaggatgaaatcattagcccttgcattttattcagtgtaattttccttctttcctgagggagtgggagttatcaaaatattttttggagaagtgtaggatgacagaattgtaatatcagctaccgtgaactgttcgaagttctctttgtaacacaaaaaaacaaaaactgatttattcatagtttattttttaaaaatactttaaattctgggatacatgtgcagaacgtgcaggtttgttacataggtatacacttgtcacggtggttggctgcacccatcaacccatcatctacattaggtatttctcctaatgctatacctcccctagaccctcaccccccaacatgccctactgtgtgatgttcccctccgtctgtccatgtgttcttattgtccaactcccacttatgagtgagaacacgcggtgtttggttttctgttcctgtgttagtttgctgagaatgatggttgccagcttcatccatgtccctgtgatcattaaaaagtcaggaaacaacagatgctggaaaggatgtggagaaataggaatgcttttacactgctgggagtgtaaattagttcagccattgtggaaagacagtgtggcaattcctcaaggacctagaaccagaaataccatttgacccagcaatcccattactgggtatatacccaaaggattataaatcattctactataaagacacatgcacatgtacggttattgcagcactatttacaatattcagaggttttatggtaatattggtaaacaaatatagcaaatagattttaaaaatgaaaacaatggatcatgatatattccacctcatatgatcagaattcatttagaaatgggcttcagggggcttgtggcattcagagaaggctttatataagaaatggaacatcctcctaaaggaaacatgggtgttgaactacagtgagattgggggtaaaacatttcaagttgaaaagtttgaggccatggtatgtgtatttgtgtgtgtagcttagagggaagactgatgttgggagattctgaaatgtgactgatagctaataattttgaaattgacttggtagaaaatttctgactcttcttaagcaggagagtggcctaatgaaaataatgtttggattattgcgtgtggcattcaagttttctagaatgcaaagattggtattagcaagagctgttggatggatagcaagatacactaccaaataaataatttagaaaatttgaaggtacaaaacaccagtgtaaacaatgtttccagagttgaaacctgaagctcaggtctccaaatcactttccctgtaggaggagtgaggaaatcagttttccttgtaatagagctgcctccccttctattctttctacttggtaccatctaagttatacttggtctcagaaattatcataacaggttgtattactccattctcacactgctgtaagggcacacccaatagtgggtcatttataaaggaaagagatgtaatggactcacagttccacatgaggggaggcctcacaatcatggtagaaggtgaaggaggagcaaaagcacatcttacatggtggcagcaagcagaagtgctgagtgtaagtctcttataaaaccatcagacctcgtaagaactcactcactatcacaagaacagcggcactggggtaactgcacccgtgattcaattacctcccactgggtccctcccatgattatgggaactacaattcaagatgaaatttgggtggagacacagccaaaccatatgagatcattctaacagtaataggtatctctgttgatgtatccacctgaagaagagagggagacaggcaggggagtcgtttaggtcgtaagcacttagtgtgacttttcagccacggtgtaagttcgagtgtgtccaaaggtctgaaagcccaaatttcacaggtgtacagaatgtgtaggtttaccaggacttattctactcccaatggcatctttgttttgcataagagtctggtattcttataattcttttcttttctattattttgagactttaattaagccatagagtgtaactgtaaattcatgtgacctgaaactgtaatttttattatgtttcttcttaatttacacattggaagccattttgttttttaatttttattttttgattttattttattgtggtaagaacccttaagatctatcctcttaaatgtttaaatatataatgcagtagtgctgactacaggcacaatgttactccagacctccctgattttgcacaactgaaatttcatgcctgtttatttataacttaccatccctcttccctcagctcctggaaaccaccattatggtctttgatttggctattttaggtacctcctcccagagaaatcatgcaggatttgtctttctgtgactggcttatttcatttagtataatatcctcaagattcatccacattgcatattgcagaattttctttattttaaatccggatagtattccactgtctgtgtgcgctcatccattaatgaacacttaggttgttttcataccttgggtattgggaatgttgctgtgataaacgtggaagtgctaatatctcttcaagatcctggttttaattattttggataaatgctcacggtggaattactttatcatggttttttttttttaaaggaaccttaatacggtttccgtagcagctgcaccattttgcattcctaccaataccatgcatgggctccatatcctcacagacacttgctgcctactgcatttttttcaacttttattttaagttcaggggtacatgtgtaggtttgttacacaggtaaacttttgtcatgggggtttgtcatacagattatttcatcactcaggtattaaacctggtactcattagttattttccctgactctccctcctcccaccctccactctcttttgaaaggccccagtgtgtgttatttccctctatgtgtccacgtgttttcatcatttcactcccattcataagtgagaacatgtggtatttggttttccatttctgtgttaatttgctaaggataatggccaacgtctccatccacatccctgaaaagggtatgattttgttcttttttatggatgcatagtattccttggtgtatgtgtaccacattttctttatctggtctatcgcagatgggcatttaggttgattccaggtctttgcttttgtgaatagtgctgcaaagaatatacacttttgactcaacaatcccattactgggtatatacccaaaggaacataaatcattccattattaagacacatgtcttttgcttttttcataatcaccatcctgagagaaatgaggtggtgtctcattgtggttttgatgtgcatttccctgatgactagtgacgctaagcaatcttcataggcctttgggcccttgtgtgtcttctttggatgaaagtctggtcaagtccatagctcatttttgttgatgttattataaagttctgttatcattgttgtttttgttagtgagttggagtttcttatatattttggaaattaatcccttatcagatataagatttggaaatattttcccattctctaggttttttttttttttttcgttttgttaattgtttcctttgctgtacagaagctttttagtgtgatatattcccagttgtctatctttggttatgttgtctgtgctttaggtgtcagagtcatgaaattattgccaagacgaatgtcataaaagttttcccatatgttttcatctaggagttttctagtttcaggtcttaatttgggactttaattcattttgaattgatttttgtatgtgtagtataagagtccaatttcctttttttttttttgcatgtggatgttcagttttgtcaacaacatttgttaaagagactatctttacccaatttcctatctttggtatcaagccattttaacaagaattttaacactatacattttctgagagatgcatatgcttaggatgaacagtttaaattactaaattgatagcacatgccagattaagttctgttatgtctttactgtaattctttgatatttttaatatttcaagtacagatacattctaattttgatttaattctgccagagcaaaatgtatcttatttgtttatattgaatcaatattaaggaaatatttacacaaaaatatgatcatatattttaaatatctgtactgtaaggaaaatgcttttatatcttaaaagttattgaaaaccatgggtattattaggaaacattagtcattattttgattaatagtttaggctaagtcacttgaacccctgatggtgcctgtcagattgtggaatacacatatatctatttgcagcctctctgtcataagggctatgacaaaaattattatttaaaaactattttgagtttcacagaaggaggctataatttctataaattcatgtttatgtgactttgaagtagattcaaacaaatgttattaatatcaatttatcctgttaatctagggacacagcacactgatatttcccaagaaagagtaaaagattgaaaggacatcaataggtaaaaccatcatttgctgaaaactctttgccctgagaagcagaagcctgtcaaagtccaacacaaccatatatcaacctccctgtcaaggacatcacacctgcagtagaatcaacactgtaacaggttgaggatgaccttagtgttgtgctattgatttagtctccatgttgttattagtctgatattctaaggttcaatgaatttgatccacataaagtaagtatcaaaaagaaaagcgtggaacctaaaaagctccagtcaaaagcaatcacttccaggttttcaaacataaaaattaaagggattaaacttggattgattaaacttaggggaacgggactagtagatttgataattgtgttatttgaagatcaactgaatttttgcacaaaccttcatggccaatagaaatgagttgtgcccccatgtacctaagggtcaccgatctgcaacctacaagtagggtgacctgatttgcctgagactcttccggtgaccaaactcaactcatcattgacattaaaaggagagcttttaaaatatagatcctatgggcagcaattcagagttacagagtctaaccttatagcagtgaggtccattaatctgttttttttttttttttttttttttttttataaagtacccgagatggttttgataatatgggtgcttgggaaactctcctccgaaaaacatagagttcctgatttggaaatcttgctgcttaaataaaatatgtgtatatgtgcacacatgtgtggtgtctatttttccctttcctttttccaaaatgccaacaattatttccccctgtgtattatgactatagcttgtgcaattacaatgtttgtatgtatcacagttgattctaattaagtattaagacgttttatatactagaccaagaacttatttaagaacttattcctctctttttctgtttgcaatgatcagcatagagcctgtatatagaaggtattccataaataagctaattaataagacaagacacttggaaccattcagatttttaaacctgttccacaggacattgaagagaaatattcaggggatgcttcatgaatgaagtgacacctgaagagaatctggaatacactaaggcccagacagggaggagaggtttataagcaggagggaaaaaataagaataataccatgttgacaggcatgattgcgggaaaatttgtagatggtggaaagtgtgatttggtaacgtaaatattttagattcttcaccaaggggcaataagatggcagtagagtcttagtaaggcacatgtgatcataatgaatatgtttggagtcaagagaagctggtataaggaaattctggtggatgtttacaccatatagtacgaacgtcctgctcagagtcaaatgatttcagtttcaaaatgtgccatgttggtgtgctgcacccaccaactcgtcatttaacattaggtatatctcctaatgctgtcccttccccctccctccaccccacaacaggccccagtgtgtgatgttccccttcctgtgtccatgtgttcttattgttcaattcccacctatgagtgagaacatgtggtgtttggttttttgtccttgcgatagtttgctgagaatgatggtttccagcttcatccatgtccctacaaaggacatgaactcatcattttttatggctgcatagtattccatggtgtatatgtgccacattttcttaatccagtctatcattgttggacatttgggttggttccaagtctttgctattgtgaacgtaccctaaaacttaaagtataattaaaaaaaagaataagaggccaaaagacactaaaaaaatgaatgaaagaaacccatgccttatctcttgttatataagtagtgttatttattttctggtctatgtatgatttataccgcaggaccacatttgtacagagtccagctcctgagcaagcttttgtggtgggcagcatatgaccataaacaaagcttatttttctccttcttcccatctcttttcttccctcttttccttctccttccatttctccccaccttttcagagaacgagactgcattgattagttctgagttattcagctcatatgatgtaatcattttaatgtatgtgatgagtaagatacaatctcctcaatttcaactacagattgctgacataatgaaaaaaatatatttatatatgtcactggaaatagataaaaaatgcaactgatataagctgggctcatgaagggtcctataatactctgtggaattcacaccattctaacagccatgaagaaatactgaagtattttaagcaaagttgcaactattattatatattcattatagctttatcatgcctaaatactattgtataaagttttcttcccacacgtcagaaacaataagattctgaaaaatattataataaagttattcttctgacaaatgaatcctagagaaaattccccacctgcaacagttccttcctcagttttctctgactcaatacaatttcattcttttcgttttgcagctcaaaaatcttggtgctatcattgtctcttctcagtttctctcttagacctaacgcattaacttcacactactttcaaaatatattctgggttcgatcacttctaaccaaccaaatttaagctaccattggatttttctcacctggattattacggcacacctttaaattcctgtttttgctcctacccacaatatggtagccagaaagatcctgttaatttaagtcagattacagcacttccctcctctaacgactttccttctttctttcctccccctaacgactttccttctctcttagagttaaaatcaaatgcacttattgtaatgtatgagacccctcttggtttgtgcccccattatctccctgccttcatctgttttgactcttcccctctgctctctcctttagtcacatggtccccttgctttatgaacatcctggcattctcccgacattgtacatacatgcaatgcactcagcctgaaaagtctttcctcagataaatgcatgtctgactccctaattcccttcactcccttcctatcttcattccaaaggccactttccagtaaaggcttactttgccgcactgtctaaaattttaccccttctctccaaaactttttcatattcccaattgtactatgttattaatttggtgcaaagtatttgtggtttttgataataattgtgaatattactttctctctactggagagaaagctctttgagacatgtattttagtctcttctgttcactgttatatcccctgatatgtcagtatctgatacataataggtactcagtaaacatttgtcaaatacatgaatatatgaaattatgacaatatttgaaataattctaattatatttgaaatgctagaacatatatttatgtctattcttgaatcataacatagaagaagtctatagaaaactccattcttttatttcttatataatctatatattggattgttcttttgagctctgagaatatcaaattaaaagtactgaagtaaatactaattagtttctatcggtacctttatttgttctgaatgtttctcacttgatgtttagtgttagatatataccaagacaaaattaaataaaatagataagtgtttttcctataattcatcctaattattcacatttaaaatttagaagggactttattagatgcactttttatctatttttagataggaaaggccaatttgcattctcttcaaggaaataattggtattcataaaagttggactaacaatttcatttacatttgaaagaaaattaaaattaatccaatgtaggatattatacaaagattactatgcaaatatatttttaaaagttgctatatcacatagtgaacatttcaatggaacattctaaaaatgttgaggttttgtttcttaaaaaaaaaatacattcatacgtaagtgtgagctcttctcacttccataatagaagtgagaattatgctgtctgcgtactcatgaccggcatagttttccacaagtgctggctttaataggtgaatataaaatgatgtgattttttcttttttactgacatgaacattattattgtgcctttggttgaaataaatacttgaaatgtttgaacacacacacagccccatataaaacagttaaaaagttgttcttttgggcattccatttgttggtcagatatctgtattaacaccgattcatatccctcaagctgatgagaatgcagtgtaactaacgttgaatctaaggccaaaaagtatctacaaacaactggagccttgctggaaccatttgaggccgccttctgacctcctgtctcggcatatagctctgccagtgctttaacttgaactagtgagatctgaagcccctaaaaaaatactcatttttatagcttctaacgacagtatttgtcttttgtgtggaaatcatttttcagcctcaaacccttagattgggttcatgtggatttcaaaataagttgtcttaaaaatattttgctccataataattaaaacccatatcaacacatttttggtaactatttttttgcaatccttcatattaagagaattgtaatactttttttaaaaaattatatgcttagccatttgtatgtctttcctctacaaattcctcaaaagtcccacatatttttttctgaaatctcctctattctctcttagtttgttgtgttatattgtacatggagatgaaggatggtataatgtttaaaagatttttggctttctgaggagtgtttgtttgacttatttgcttttctgcagagcagtggacacagctcacaggctggccgtgctaccagctcttgctattattcactgtaaactcggtgtgcagggtaccgaccacagacagctgcccaggcaggtggtgtgcactgcacagagtctccgaggtaaggcagcgtaagagccagcaagacctttttaacaaaataggcgttagccagggtgaaaatggggaaattgcacatatatagcacttgagtgtccataagttgcatttcacctccttttttctcactgaacctcataatcatcctgagatctacttacgtattatttgtcccattttccaaataaagaaaatggggtaaagagaggttaacttatttgccaaataagagatagtggatgaaatcttgatcctcttactacaggtttcttactcttccctcagcagctcagcctcctctattgctcagcaggcattgtggagtgaatggcacagacctctccattcataagtccctctttcccattttctttctccttcaaagagcactggtacagtcacctgaaaagctaaagatgcagtgtgacaactgctacatcagcaattccagacccaccttcccacaccatctcacccctaccttgaaaagaaacctttgctttagattaacattaattaagtcatgcattagactaacataagactttatctattatctatctaatctaatcttttattctatccatctatctaccatctattatgtatcatctatttactgaattatatatctaatcttctatctcatctatttatcgatttatccatctatatgtaatctactctgtatcatctgtctgtctatctatctatctatctatctatctatctatctatctatctatgcgatatctatcacttttcaacacctaattcacaaaaaagaagccatgagggagattgtagactgtaggagaggtacacttatatatgtaaacatttagagaacaataaaagactacaaaacaatattatgtttaatgaaattaccatccaaaaaacgtgtttgggtgagcaagtggtaccacatctgagggaaagttgattgtgtggtagaaaaacagagcctttggcatcagaaggactgagtacaaaccttggctctgccaattaatattgggtgacctggaagaacatgtctaacttctccaacatacacattttttttcttgtaaaagtgatggttatagactcttctaacagaagtgttacaaagattaagtgattaatgtctgtaaagctgaagctcagtgcctagcatacaatccactctcaaaaaagagagcaggtttccacacctgtaattcttaataaacttcattaaatagcaatgtctaattattttgttacatagcaatattttatcagcaacgtttattggattccaacaaatattctttcaacaaatacacaaagaaatggaatatttcatggttatacttttttctattgtataatgtcagtctttttttttctcaagtagtaattaaaacttgctttgaaaaatactagtgtaacctaaaactactgtattccttaaaagtacttagaataaggagagggcagcaaaacaccacaggaagtataggggattgcatcccagacagacatggtcttggcttctggatctgcctcttggtagctgtgtgactttggatgaattgcttaatctcaccttgttttaagtgagataaaatggggaaaataatatttacctcacagttctgataggaggggtaataacataacgcatgtaaatcatgcagaacagcgtattatgataggtgcctaataactgttaattccccttcttctctttgttttactttcttctacttttctgtccctaatattctgatcataacacctccaggaacaaaagaagaaagacagaaatactaggacagttaagaagatccagtgagaaaaactcatatagagaagacaagattattgaaaattctaatcatttcactgaaactgatgtttccttgaaacaaacattacccataagaatggctgccatggtttatttaggaaacaaagtgtaatatttacaggggcagagaggacagcataagaatgaaaagagttagtgaaatctgacctttggtgagctggcactatttagtaaatctcccttgccttggtgaaagggattggcttccagtacagttaattccacatggaagagaaatataggagctttagccctgagggatattgctctataagcccaggttcttttcagattattctggttgattaaacacacagagaaataacccttttaaagttgtacatatattaagaattggagtaggcatataagcatcaccttacaaccgacaaaacagatttccaagcaacatacaatttaaattaatgcagttgtacgtaataatgattattttccaaatgatctatttgattggtatacatgctttctgactcttctcccaacagtgccatcagctgtaagggaaggattgtggactaaactcactcccgatatttagattatgaaggcaaagaaactatggagaggataagacaggaatttttaaaaggagaggactaagaagacaggggcagtatgtactatattgttaccctcccaggctggaggtgtggaaaactattataaaccgctaatgatcatttttttggtgttcgttattagaaccaatggaaggaaacatagcaggtgaacctcactgtattctctaaggtctttccagaaaagttgtgcctttataattaattctattgtctattagagtatacagttaagtgcatataccaaacttctttggtaaaatgtatagaattaaagactttcagggctgataagaggcccagtaagtcatacaggttagaattctcagaaagttaaaagccttatgagaaatttccattggctcaaatcagatgagaataaaacttgatcctacgtgtcttaatattcagtctaggagacttgccagtacccagtgcttctttattgactgattaaccattttctaactcactaattaggcaaaccagaatatttgtatgctccctgtgtgtgattgtctaggttgcaaattgagctaatttaattttgttgtttacaattgatacatttatttttgatatcctttggtagccttttgttagaggtgagagttatagttttatttcctgatcacactatcatctcatgttaaaatgagggtaaaaacacaacaatcaaattctacaacattttcaaacacttattagcaatgaaacagaaaatgtaatacaatctaccctgtaagtttaattaagtctcaacctttgtgttttttagtactgtgacaaactccgggcatgacagtttcacttagacagacatgacagttttctgttagcaggacctggttaccttgtagctggaatcaggccaaagcatcttctggaagaggttgctcataggacttgtggacattcatagcctgaggcaccggggtgaagagtggaagtgacactctaggtgctgggacatgttgtgcacatgacagaggccccacgtggtatcttagcaagtccacatgttttatgtcactcatgaaacatttcagtaatgagaaatcattgcccctctgcatgatgataatgaaaattttgaaggttattaggaatcagcatagctgatggattataagaacgacatctggcatgtactttttttttaaccactttatttgggtatgattgacatataaaaactttacatatttaatgtatccaactcaacaaagttggagataagtatggacccttgaagccatcaccacaatctgtcataaccctatccatcaacttcaaaagtttccttcttcctttttatttatttattattattatgatttttttgggggggaaataagaacatttaatataagaggtacattcttagcaaatttttaagcacacagcaccgtattgttaactcaaggtggatactgtatctctaagacttattcatcttggaaaaccaaactttgtattctttaactaacactatcttctcccatatctctcctgatcccacccctggcaactaccattccactctctgcttctattaactacttcagattcatcacctaagtggtaccatgtagtatttgttccgtgtctggcttatttcacttagcacaatgtctacaagattcatctctgttgcctgagtgtgggattttgattggcatctcaaatcctgacaatttctgcagtatgtttattgtacgagtttttcaaagatttgccaactgtcccataaaactaatatgcatttaaaataaagtttttaaaaatataacaaacaacaaagtttgagttgggcaggaggaatatattttgagatctactgcacagcaggatgactatagtcaataataacatattgagtatttcaaaataactaagagagtaggtttcaaatacctgaccatcatttcacattgtgtgatatgtatatatacatacacacacacacacatatatatcacattgtaccccataaatgtatataatttatcaattaaaataatattaatttggccaggtgtggtggctcatgcctgtaatcccagcaccttgagaggccgaggtgggcagctcacgaattcaagagatagagactatcctggctaacgtggtgaaacctcgtctgtactaaaaatataaaaattaactgggtgtgttggcgtgtggctgtagtcccagctactcgggaggctgaggcaggagaatcacttgaacccgggagtgcggaggatgcagggagccgagatcacgccactgcactccagcctggcaacagagcaacactctgtctcaaataaataaataaataaaataaaaataaaaagaaacagaaaaatcgaattattttatttcctatgaataaggcatttataaattattgtggaaagtgcctgtataacagaatattttttgaatatcataagtttgatatttatttcaatcatattttggatagatttcagcccattgctaatcatccattctccttgttttatgcaatgtcaaagaccacttcattttgctttggataaataagttttatttgatgaatgctgttgtcatttaaattacatacaaaaaaaatgacacaattacattaaatacatggaaattaaatgcccgtctccttcctacacacccacacacatttacatatctatacctttgtcatgtcatctcttcccacaaattataattttagccattttttctgtatttaaaatgaataattatctttcaccagttaaaacacttttatttgcttgcagaaacgtaatcattttctaataaaatagtagcagacactgcagtaaattctagccagaatttggttattatattaatctcacttcccatcactgaattcctttgcagggtaattagattgctatctgattctatcttgagtccaccaagtcaaggtgcaggcaggtggaaagtgtgttaaataagtgtcctgcttgatgggttctttttaatgccgatgagtttgtgccagtacaaataaaattatataaattactgtcaatcattagaggtttaaaaaagccaggttatttattatgatggtgtatatacatatatgtttatatacatatatatgtgtgtatatatgtatgtgtatatgtgtgtgtatacacgtgtgtgtatatataaatatgtgtgttatatgtgtatatatatgtgtgtatgtgtgtgtgtatatatatatatttggctaagagtttcttataagcatttcatacatggctaattatttctccagctttactatgcacagctatcaacctaagccctactctagctgatcatccctaaattcccttcagaatcctgccatattagagtaggagaaagagatgatacttttgtgtcaagtgagtagagtgagaatatgtcagttttcatatttatagagtgacgtttgacatctttaaagagaagttcctgaccttccctttgtctttttctaaccaagaaaatgtcagccacttccattgcctatctccagccgcatctagtacttctctctattccaaagcttcaacatactcttctgtcattatctgatcatctattggtcttcctctttcatttcaattcaagggaccttgacttatttctcatggttgtcttatcagaacagttcctgatgaaattaatttactgaatgctggaacaattccagccttcattacataaggaattcagtgaaaccttccttaagctcacaactctagtgtcaattatatattataaacacacaatcacaaacatttttaaaaacatgtctgcattataatgtcaaaggtagaaagaaattgcccatcatcgtccaggttgtcttgaccatccttaagagtgccttctacatttcccttccatattttctttaatgatagaaaattgtgtagaagacaatagaagaggaactaccccctctaggtcaataagacttttcaaccacccccaaaggtaatatctaaattgtacaaccagaatttacctgactggccagcatatataaaaggggccattacaaaagtatggcacacaggtcagaatagagatattcttctgaaacaaattacaataaggtcgggtacagtggctcacacctgtaatcccaacactttggaaagccagtgcaggtgaatcacttgagcccaggagttccagaccagcctaggcaacataatgagaccctgtctctccattttttagaaaaaaaaattagcagggcgtggtggcacacacctatagtcctacctacttgggaggctgaggcgggagcgtcgcttgacctagggagttccatgctgaagtgagcagtgattgaaccactgcactcagactgggtgacagagccaaaccttgtctcaaaacaaaaaatgaagaaactccacaaaatcacaatgacctcctcctccacagtcaatgatactagtggtgaaaatgatatgaaattccggcaacttttaaaaataaaatttattcctacaaatttttgttgtcgttgtttattgtttttgagacagtttctggctatgttgcccaggtcataatacagtgatgcaatcatggctcactgcagcatcaacctccccgggctcaagtgatcctctcacttcagcctcctgagtagctggaaccacagtcacacaccaccatattcagctattttttatatttttttagagatggggtttcacaatgttgcccaggctggtctcaaattcctgggctcaagcaatcctcctgccttggcctcccaaactgctgggattacagcatgagccgctgcacccggcccaaaaacatttttgaatctccttaacttgtttctaaatcaccactcttatttccactgaccacttaaacagatgacttgaattagttataaaactgctctggctgtttaatagatttgatataaaatacttttacattataatagatttgttttagatatgagtttttctttttgggaaaatgatattaaaataaattttacttatatttttaaaaaaatttctcattttattgatagggtatgttttaaaaataagattctagtcttccattaattaaaacttgtgctaaaaaattaaaaaggttagcctttcaattttaaataccaaatatagaaaacatacatgttaatttacagaatgtgtacttgataaaccaaacttaaattgagcaaggaacaacatgacgcattttaaggcaaatacataataaatgctaaaatgttgtagcaatattctggctttaaagaaatattgattaaatttattaagactgggctttgtctcaacacttaatggcaactatgatttaaaattaattaaattatgtttaacgctactgtgcatgtccttgaaacctcagtcaaattatatggtcattagctttcatttttatgataatgaaacaaaaaatacagtttccaaaatatatttttcactaaatctatggctaaaattgaatttaaatttctaggtttttttatttaatcaaaaaggaattttacaattcaatcaattgattgaaactaaaacttcaaattagggaggatttaattcaagcctgctattgtatttattattatttaaatataacatgcagacgcctaaactacacagcagacactctattaggttttgtatatatagaatcacacacacatactcccctagtttgtgagaaagtgctctaatattacagacacagattaaagtttagagaaatcaacttgtccaaggttacatagctagttgcacacacagaattttaaatcattcttatgtgactctaaaagaaaatacggaagtgaactgattaactttgcagttaagtttgcaggaataccctgggcaacacagaccctctgtcacagccaaatgttttgtttcgttgttgttccttaaatatgaccaatgctgtcaattctgcaactatattcttgcatttcctcatggctggaaggtctcatttttttttctgtcctttagatattaatcatcctttaaggctaactgagagccacatattcaaagaagacttccaaaccattacactattgaactatcccagcttttacctttctcgtttgggaacttagagactcaacttatggtattattaatactgcctatcctcagaccccagagacaaaacatgctgtctactttctcagtatcctccagagagcatgttatagaaattgacacatagaaatgatctagtcaatatttatttactaccagttgctggtacctggaaacattcttagtagtcttggttttcctggagtcctaatatagtatagtacagccagagacctgtttggttcacagaatttaagtaaacttcttgatcttacggtgtctgctagcatcatgagaacaggcaatgcaatatcttaagaccagttaaaaggaattagttttgagaaaagcttatagaggttacaccactttgcccttcacagaatctttcatttcagccacaaacccacattatcaattccctttataagctgtggatgacttgtcaggaaagatagtaacagtcaaccaataaatggaacattgtctccctaattcattcagagatgtttgcccatggagatactacctggtgatcttgccttacaacatcttgggcccagagatattgctgagattcttgtatttcccctctcatgtccagcattaatgtataagtcaaatacccatattctgtaaattctacacatctaccagtaggcaaggctggagatccaagttcttattatttaatcaactaatcagaaaggaagttctggctgatatttagaagttctgttaacatttcatagaagtaaatgtacaatttcccagaagaaaagtatcttgggaacacagagaccatctacatggacaaaagtaggggctaataatgatatgttacctcttgatattttagagaggcaacattgcttagtgcataagagtcaagacctgtggttgaagtcctgttcaactctgtactctcaatattaccttaggcaaataattaatttctctacacctttatttccttatctgtatctatatctctgtcggttgagttacagagagggtagctatgaccattaaactagatattttctggcacagagtaagtacttaatatacaaattttatatatgtttcatatatcatatataattatatattagagttgtatattatataacaaatatacattatataatgtagtttgcaaataaatattatataatgcaacatgtaatattatatagtatatataatatataaatgtagcatattatttaaaaattaaaaatatgtataaacatatatttagaatagcttacttcaattttatttgaggaactcattttttggctgtccacaacataaggagtaatggattattggtagattttcacagtctgattgtcttttattagatttagatcttctttctttccttctcatttctaactttattcagtttatagtacttagtagtttacaaaatatgtttacatatatcattgaatttgatactcctaagaaccccataagcaaagtatgatctcttattatacatattctatagataagaaactgagcatctagaagttaagtgactgctcaagatcacgtggctaggagtttacccaaagcctaaacttaggtcttctgatttctaatctagtgtttctcctactataatatttcagtctgctttttcctttcactctaaggcttattattttcactaaattcaaattgccttttctgctttgttaaatactagagttagacatttgtaaagttaaacacacacacacatacacacacacacacacgacattaagggcaagatatatacttccaaggtttctgagaggtacagcttatacaaggaaaatcttttgtaagaaattgtatagatctacttattcatgtgctgagtacacattttcaattttgactattggtataatttagagaaattcaattaaaaagaaaaaaataagtactcctctttaggcatttattctgttcacctgaaagtatattcatagccattttttttttgttaatgttaaataacagatccctttccagggatcctttccagggatccgttaagtgcagtccatgttagagttaatgaaatagtaccacagtttcagagataataaatatatgggggtaaggaactcacattgctacgcttttttattctgtttgaagtgatttgctttttgaaaaattgaaaatcagtggaaagctagtgaataagactgattagatgcagaaaaccacttgtgttctacaggtaaattagaaagtttgttgctacaaaaaacatcccttcgaaatgtaggcatacacaatgatttttaaagttgttagaagaagtctgcacatgagctgttcattttctatttagaataaacgatgtgagtggttttgactcctttctcccagtggcccatgccatacttcaaatatgaaaggaaataaaactgcaagctttaaggaaaagataaactctcatgcctgctatatttgcagagtaatcaaggattatggtatatttatcccatttcctcactcctcccttcttgttatttcagtcttcctcatcaaaacacttacttttcactgaatcctccaaattagcttctcatgcatattcaccggcagatcacacagtgactctgtaatggctgcagcctctttgcaattgaggcacagtgggccagacccccaccaggcaggttgcctgttgctggtgtaggctctgggaggtgaacatcagctttgttattccagctgggtgctgcagtccttgaactagcagctttagtcttccttaagatagcatcgtcgttttaatgagagtgaatgcatagcaataaatgctatccaagtcacaactggaattctcctaaggggagatgacctttcatatttttaatgaagatttatctttcaatttccatgaagcaagtggctaggtattttgttatttcatacgaaaataaaaggcatctcatagtaattttttctttgaaaattatttctcaaatttttagacttttagtggaagcgcttttatcttggaagattccactaaaaaagtagaatatttaccactttgggaggctgaggcgggcggatcacgaggtcaggctgaccagcatggtgaaaccccgtctctactaaaattacaaaacaaattagctgggcgtggtggcaggcgcctgtagtcccagctactggggaggctgaggcaggagaattgcttgaacccgggaggcggaggttgcagtgggccgagatcgcaccactgcactccagcctgggcgacagagcaagactccgtctcaaaaataaaaataaaaataaaaattaaaattaaaattaaaaaaaaggaaaagtagactatttacaagatttacaagtaacctagttggattataacccttcctcctgcaaatttatttttctatgatcctagaaaggtcttcatagtataaggattcttttggacttttgtgttggagataacagctaaaagaaaaatatccatcctctgacacacatacatacctcattgtatttatttacttatttattttttattttttaatgaacttatggcttctactttcatagcaactgactagaactacacaggaaactatagacagcaaccttagttatttcctggtttaagtgatgggatgtaatcatactgtatagttgtgaatagataataaaattgcatgacaaaaatgaaattgagaacagacttctgccacccttctgtaataaacagtataggaacaacactagacactagaatgataagaatgtgtcaggaatagcccaatacaggaattcattttttgtctgccttggcatactgcattctttatcaacaaaagttatttttaaaatgtcacataataataatatatgttgtccctttttttaatcttaaaggatcacatgttaaataaaaggaacaattagtagactatatgaataccttcaaagcaattttctaaaacaataaatgtagtcagatttgaaaatcaatcaatttaattatatttgaaattatgatagtaaaaatctatatagtcttaattattagattatagtttacctatcttcattgcatttgatgaaaaactttaaagtagaattatactttgatataatttagttttacttaaatttgttgttgcactaaattatcaagctatattttctttcctggttattctaagtagtgtcaagcacatatcagaaaacccactaaattggtactttaacttttaaaaacagtcttattagtgccatgtggtttaaaacttagcttaattcaaacagatataattttaacttaaaactttttttgggggacggagtctcgctcagtctcccaggctggagtgcagtggcgcgatctcggctcactgcaagctccgcctcccgggttcaggccattctcctgcctcagcctcctgagtagctgggactacaggcgcccgccaccacgcctggctaatattttgtatttttagtagagacggggtttcactgtgttagccaggatggtgtctcgaaaaacattttttatatattaaagtgtttttcaaatttgacaatgtagaaaactataatattttatttcaagaaatgtgtataccttaatccaattagcacctagattctgacctatgttggcacatagtatgatcagccagggcaccagcatcttgattacagaggtgattggatagatccacccatgtcaagcagacccaaatgttttcttttgacttcgggctttccaaaagatacagtagagataacagaaggattgatgaaaggctgaaaccacactatgaacagcatacgtaatctactattaaaagttcctaattagggtagcaacaaaaactttagtcagatctggataaggcagtatctctggctgtgttcttgtctgtttctcctcatcctttttctgttattctcttaatttcctgcagagaggtagacattttagtccacctattttgttaatacaaaggagcagtttctttatattgtcgttaatttactgatcgtataggattatcaacctctttcattgcttaatgttcaaattttaaaaacactttttcataaactatgcttgcttctattgctctaacaatatttgttcctatgttctactctaaattatgcaggtttaaaatctttctcttattttgctgcattcttgtgaagtctgcatacagattcttgattcaaaaaatcatggtttctgtacctcttcctcaggagaggttttacagattctactgatttttggtagacagaaaccaacttttaaccagtgtactacttggaaaaactctttccaaatactgtagaggaaagatgttgggctttgaagccaaacagacttgtgtttgaaacctggttcccatgtttccagctgtatgacaatagcaatttacttcctaaacttaatggagtaatatcgtattaatatttatcccaaggtgtgactgtttggattaaatgagattatctatgggtgtcccaaagtcacgcaaatcacaagttcccatcttgttttttctctgtggttacttctttttattttttttatttttaattatttatttatttatttactttttgagaaggagtctcgctctgtcgcccaggctggagtgcagtggcgcaatcttggctcaccgcaagggctgcctcccgggttcacgccattctcctgcctcagcctcccaagtagctgggactacaggcgcccaccaccacgcccggctaattttttgtatttttagtacagacggggtttcaccgcgttagccaggatggtctcgatctcctcctgacttcgtgatccgccctcctcggcctcccaaagtgttgggattacaggcgtgagccgccgcgcccggcctctctgtggttacttctaatgttggaagtcatcacagtgaaattctttgtgctatcttcaccatgggaatctttctgtttattccatgcccaattacatatatttcacatttcaaactttatcttgagtgaaaagaaagaaggactagctcctgatatattcctcatggatattctcataaaaatttgagtgtttcttttccagtaaagtaagttaatcctttccaacgctctgattattagctcagcacctctatggtattatagttctttttgaaaaatactgcaataattttcattttcataaattcagtggaaactgagttgctccaggtagggtagcccaaagctgactgacaacttcaaagctcacagacaagggcaaaaagcatgtgtgctgctccttgtgaataatactacaggaaaaaaaggcaaaattcctattcaggtaggtagatggtcaaaagagtttcctacaagacagtgtcacgtgcaattttatctacattgttataacttccctacctgacaagacagtgtcaagatttgttaatgagatggcctcacaagtgtatatttaaatattttatgaaaagccattgtagctttctatggatctgacagtagttaaatgcatgagctcccaaggcctatttcaggggctacgtgtatatatctttttccttccaaagacagatgaaggtgtgcaagtcactctactgatttgcaaggacaagaaatgtgctttttctctaattcattctgatattagctattggagttctctttgccctatttcagcactgtttgtacataaatacaccttattactacagaaaaaaattccatgatgaaacctgaagtgctttaatgcactggtctgtagacacagcccatttttttttttctctttacctttgattatcaaggagtaatttgctcaccagcaaacactggataatgtaatatataactttctctaacagaacagaatacagtgagtaggcatttttgaacggtctgttttgatattttggtcccactattctaaattttggggatgcttgtgcggaggtaatgcttaatctggtatcaaataattgctatctgcatctgtgctcattaaatatcattttttaatccagaattttttcctgtactaaggacaaaatgaatattaggccttagacatttttatgtgacatctaaaaattgaagcaggtatatctctaagtaaactaataatggttgatgattttcataataaatgtgcacatttaacattttcctcttcaaattctaaaggttggaaagtgaaggtgaaatcctatatgaaattgtctatatatgctataggttataaatccagattatcattttagattctgtatgttgacatgacatgtaagaactgatgttgtatgaagagtaataataatgatattagaacaaaatgtaatttcctatcagcaatgattagtatttaataataaaatatattaataattaaacattttgaatatagccaaaactttgaaataagaaatgaaacacttaggtaataaatgagaatttagtcacaaaatactgaagtaatattttagctaacttattagcatttagccaaataataagaaaatacttaggttccacttacctaaaaataaatctagtgatgtttccagatgtttagaaaatcattttctttaattaagagatagatacatttctgtgttgtaataaagaatgcaaggagatattttcttataaacctgaaaaagatgtcttctgaatattctggaatctgttttgactcatcggctctattagactttttagttaagtgtctgtttttaagaagatataattcatggtgtactcaaaataatactgttggcagactgtatatgagctgtggaaaggattgcaaactgtaatgggaagtattataataggggatctccactctgctcagatacagggaacatttgataaaatatttcttgaatgaatgattattttacataattattatctagtataatgctatgttttcagataaaaatattttatgtgaaaatatttttatcagaggtcaactttaacgccaccaaaaaattgaataaacatttttgttttgctttcatttcaggtactagaaaattaccttgcatatcattaatagtttataggacttttatttgggaggtagttttcaaaaagttatgatttttgtctagctctgagctctataccagcctctccatcccatgcaattttcatatgtcaacctattaattttgaaacaaaacaaagatgcattgaaatatttctaaatgtccattctacatcgagttctgcaggcgatagtgttgttgcataggcatttaaacatttaaaaacttttcttttctttctttttttttttttttgagacgcagtctcaatctgtggcccaggctggaatgcagtggcatgacctcggctcactgcaacctccgactcccaggttcaagtgattctcccatctcaggttcccgagtagctgggattacaggcgcccgccaccacacccagctaattttttgtatttttagtagagacagggtttcaccgttttggccatcccgacctcagatgatccccccacctcggcctcccgaagtgccgggattacaggtgtgagccaccgcacctggccaaaaatcttttcaataaaacgtgagttctgtgggttgcttggaaaaatatattctagggttctttgaatttaaagacactaagtactctattgcagtcttgaatattaaaactcaaattcacattcacattttaaggtttatgaaaagtcaaaaagtccagaggattatttagtctagacctcttaacctagagctgccaaaacgtatttgagcagaaaatctgttttctctatatttctgttgtcttttttttttttttttttttgtaatccctaaaaacatccaaggaaaggacattgaaaatccctgggaaagaaagcaatgcctcctgagtttgaagactgggtctcctatcttttttctttacagtctcagacttagggatgtctttctttggataaactatttacttccttcattttctttacttgatctttcataatgggttacattgctattaaccaaaactatgaaacatgaataaagctgagaaaaccatcagtcaagtaacaggaaagtgcgcatatttgcccatactatggacatcccaatgttcccagcgggcaggggacaaggaggacatgaacatattctccaaagccaggggagtttcaataacatttttaaagtaatatgttgccattatggttgtcaaaactataatggcactatgttagataaaacagtatgaaaagcaatatcataaaaaagtagataaaggatggcatgattttatgtgttgaattccccaagatatagtacatttgtttttttccttgtgaccttggacaaaagtaacgatattctataaaaatgtggtttgtataactggagttagtgtcaggggtaaaatgaaagttggaacaagcagaaaaagaactatgtatggaaaagaaagaaaggattgtttaacaaactggtgatatgggtttctgtgaaacttgtgtagataagctggaaaaagatgaatgatggaggagcacccaacaaatattaatatataatgtcaacttaggggtaaatatcaagtgttatgcgtctctttgggtccttcgatttctccatttcgtacagtgctttagaaaaagacacacagatgtgctctcctaagttttttgtttggttggtcctttttattttttgagacagagtctcgctctgtctccaggctggagtgcagtggcacaatctcggctcactgcagcctctgcctcccaggttcaagtgattctcctgcctcagcctcccaagtagctgggactaccagtgcacgccaccatgcctagctaagttttgtatttttagtagagacagggtttcaccacgttggccaggatggtcttgatctcctgacctcgtgatctgcctgcctcgaccttccaaagtgctagcattacaggtgggagccactgcgcctggccttttgttgtttttggttttggtgattggacaaagaactctggagagctggagggatgacagaaacattgcctgacagaattatgacccaaagcacaactcaagcatatcaagcgctctgagaaattttaaaatatcatattgaatagtgtttaaatgtgctgtcctacatttgattggaaaaggacacctgcataaagacctaagaatgatttagcggcagtgcacacaaagaggagtcagttatttttacttatcaagcttgcaacagcacagtgtgaggattttgcgttcctgagcctttagtgtcaaattttttgtgtgtaaatccaggctctgacattagctatgtgttcttggtcagtttcctaagtaagtgtttgtcaattaaatcttttcttcatagggtttttcttattttgttaaataggattgttaagtggattaaatgagataggtgtaaaaaaatgcatgttatattatctggcacataaaaaatgtggtttatttcaataacattagatgttattatgttgtcttaattgtttgtatctggaaactttgtttctggatacgccatttaacaagaaatagaggctcactggaacatgctaagaggaaggaagagatacctgtcctatgaggcgtgcttgacaggattcgagtctggagataaagaccatgtctaaatgtcattccaatcctgggattccatgattttagagtatttctccttaatcccttcacttctctgttctttaaaacaaaacaaaacaaaacaaaaataacacgcatttttcttcatagaattctgtgatgagttgtattggtttttgttttgttttattaccatacacacacgttcacgcacacatagagcaaaattatctaacaattccatttttgacataaagttaaattgttttaagtcaggcatgcaatattaattaataccaactggttcatacatacaaaacaattaggccaggtgtggtggctcaagcctataatcccagcactttgggaggctgaggtgggtgaataatgaggtcaagagatcaagaccattctggccaacatggtgagactccgtctctactaaaaatgcaacaattagctgggagttctcgtgcgtgcctgtagtcctagctactcgggaggctgaggcaggagaattgcttgaacctgggaggcggaggttgctgtgagccaagatcgcaccactgcactccagcctggtgacagagcgagactccatctcaaaaaacaaacaaacaaacaagcaaacccaaaaatacaacacagtttcttataaaatgtatgtgaaaacagaatctaattttgtctctctttttctttcttactttcttcttcattttttgaaaggagtgggaacagtagataatgacctactgattgacacaattgctagacttttatccccactaccagaggtggctacccgtgggctccaaatcctattctgaagcatcaggttgccaagcaagtttgcacactgcctttctttcttcctttttccccctcttgtttcccctcatacatttttgtgtcagagattgataagttttgacaaaaggctagtggcttacattaaaaagttagaaccccaaaagccttagcctatacaataactgttcatttaagctctagtgatacatttacaccctggtatgtcagaagaacttttttttctgtcgcccagggtggagtgcagtggtgtgatctcagctcactgcaacctctgcctcctgggttcaagcaattctcctgcctcagcctcctgagtagctgagattacaggcgtgcaccaccacgcccggctaatttttgtattcttagtagagacagggtttcatcatattggccaggctggtctcaaactcttgaccttgtgatccacccgcctcagcctcccaaagtgctgggattacaggcttgagccaccatgcccagcctagaggaattttttaaaaagctaacactttttagtaaatatttacttgtaattaattgtaattattggggaatagatttttaaaaattaaatacttagggctgatccaatcattacatttgtatatttaagtacatcccatttaaacttgtctattactatattaaagttattaaagcaagtgaaacaggagtggtgacttttctttgagggaattttaatactggtggaaaaggccagattgccaacttttaaaactgaaatatgttgtcagtgggaacaaagtttgaaagaaatgtaacacaattttattaccaatgtctctaaggcgataaaatctttctaaacttggtagaaaaatataagaatgcaacttcctagcagccacatggcagttaattttggcaatctgttttgggccattgtaacccacaaatatcaataataactgaaatggcttaaatcttgtctaccgaaaggcttacgaaaaaggaaaagaaaggagagagggagtgaatatgggaggaggtgaagatacaccttaatggtgattcaaggctgcagcatattctgtgtacaaataaataggcttcaacacctgctgatgtgctggcatctggcctgaaagcaaccaacatctgtttgtaattttcagtgggagcccatgacagtgaagaactgtatactgtcactgaatatatggccttgttaacatactaaaaggatccagaagtgagatcatgaatggataatttgggacatgtgactcccatgtgatacggtgataagatttgttgggttttctttaaaggttgccattagagttttatcctgaaccattatttaatagactttaaacgttggaaagtgctttctagaggaaagcttattttaaaagagaattttcccaaccagcttacatcttccacacttttaggggatatgtgttttattggggtagatatggacattgtacaacagctcaaatttatgtaacccccagtgcccttgggagagcccatggagaagaacccagagtgtgagcaggagtcacagtggggttggctttgagcctcaaggcaggtcagaggggtacttcaggagtcctcctcccctgtctctaaaaacgctggagttcttgtgcttcttgattatggctccaattgtgatattttaggcagtaactcaccgttttgtcacctttcctctgatacaagtgctgatcaagttggtaaactcccaggtcagaaaattggggaagactttcctacatttctgttgagggaaatgaggaactgaggccttagaatttctctttaccatttcctcataatcaggaaagttctagagatgattttgtaaaatagtacattcatatctatctcgatggatcatgaccatttttctagtttcacggattcagtgaatgaattctctgttgtaattatttttaggtgtaacactatatgtagatgattgataaaatgcctaactcctaagagtggtgagggctccaccataataactacacatgatacatcattacaatcaggctttcattcagaatttctaaatttaagaaatattacctattatttgataatcttatcacctgccatcattcatttttgcaaatttgaaattttgtatctaacttagattgctgaattagattagcctaatataataaattcttattacattatttttatttaatatttaaagtgaagactatggaaggaatttagtaatgcttttgctagttaaaaacagtatttagttaataaagataaaaacaaaaatattgttctgcacaggggtaaagaggtaggtatctgtgacttctcttttattggcagttaagtttttgcctaagtgctgagactagatttagagcttccttctacagagatttgcctacgtttacaaacatacacattcctttaaaaatatgtgctgcatttcctcaaaaatctaatttttattttttaagaagttcaaaatttaaagcacttctactgtgactgtagaacaaaatagtggtaataattatcaagaatccaacatgtagatttaaacaagctatcacagttttcatctaattagacttttaaattttttttgtttcgtgattaattttaaaatacgtattcagggaatcaagaaaattttcaacttaaaaaaagtggatttctctgtgaataacatacaaaaaaagcttagtataaaaataaaactcttgaatatctacataaaggccataaacaagatcaatatttgtaaagcaatttcctttgctcattaaaaatgcacaaatttaaacacattaatatttaatttcatttttaattataaagaatacaagtaaaaatcaagcatgttcatttttgatggcttttgaaaagtgaagagtttgaaaaaaagaaagtgaaaaaaagtgaagagtttgaaaagtcagtcattttgttttcattttttgactcaggattgcttgggagagataaggacatgtgtatagatacagagacctgggtatggtaagtagtgggagtagaaacccaggtcaaagttgttgcagcatagaagtcatcatccaactagtctccatagacaatcattttaattttctatgcctggttattaattattctaataaaattagttatttgttcctaatttctttaatactgactacttttcacagttttaaagtatcgctaagttatttttgcccattaaataatatttctaagttataatatattttccaagtaccagaaagtaaacccaacaacgtgaaattaaactgtgtaatcttaattgagtgagatggtagttttgcctggagccactagtaaatctgtacttctccaagtgttaattagtgagtctgtattcaattttgctcagagaacatttgaagcactcaatatttaatttcttattatacaatgtctgttgctagaatcttgtacctgcgtcttagacacatgcatgttgttcatcctcagctccagaaaaacacaaccttaactaacatacataagaatattatatgctgtttatttttcaaatgaggtagttaattgttttaagttagattgtgctattttgaaaagaagggattccgtaagaggttacagtacattcagagtacttaaaatttatttctactatattttcttgaataattactataagttggcattttctatgtgctgtcttttataaatatctcccaaacttcattttatctctgctttataaatgagaaaattaaagattcaaagaagtgaatctgttcaacatcatctaacctgtaagttctaagctccaggatatgaacttcaaaacttatactccttaccacatgttatgcacttataactgtgggtttgttactcgctgtagacagttagtaaatgtgaattaagtcagattttttttaaatccctgctccattaactcccctttcaattatttctattttcaatagtatgcttcctattattttccagatgaaaaagtcctttaaatattttttaacaatgtaaaacagatgggcaattccttgagacttgggtctccaaaattgtagctgacgtattttactttgtgtttatttatttgtctactaaatatgtttttgctgggaaaaaaggtctgtccatagtgatataaaatcactctccctagatgatttcattacatatttgatccaacagagaaatttcgggtcttgatacatttcacttgggaaggtacatagccaatatctgattccctctcaattttttttgttgttgttaaatattttctaaacaagtatttttttaattaagtctcaaacagctacttctcaaaattccattcctttctgagctctatagaggaaagatatgataggatctataaacctaaataagcaaacagccattagaaatcttaaagatggattgtattgatgataatatagacacctatacaccacgctccattgactaatgagaatgttataataggaagtgcctcagacctctttgtgtgccaaaatgccagcccactgagaagttaacgttatggtcaatagtgtttgcaaccctccagaaagctccgtaaattgaacagactgttaaccttcacttaagctttcacatcagtctaacgggtgctctgtttgctgctgactgcccgctagagactcactcattgaaagatatgtagttcatcattcatcatttcacaaatttggttccaggaaaagactaaaaattaccctaggcacaagctgtttaatttccaccccctcacatgaatctaacaaacaaccaaaaatacaaacgacattgagtagaaaataagatgtaagttttggtgcctcagtgtcatataatgtaaaggtatttatgtgaaaataacagcttgccttgaagtttcttagtgtacataatattgcagagaataacccctttcacttttaacccacgttctcttaaacctctttctgatcctatttcctgactcttacttgctgcttgtagaagctcatgattctacaattttagatccaaccaaggcagcaagctcaaaattcacccccaaacacactctttcccctcacctaaccaattatatttcctatgcttaaggcatgtattttcagtaagcagttaaaaagacagcatgacttttttattaaaccctaaataatcatatatagcttttctggtttattaatgtatagaataattctgcagtggtagaaatttaacaggggaattttatccataactatcaatttcatactttacctagataaccagaattatgtgacttgtttgttgaaagtaacatgcgttgtatgacttgtttgttttttattgaagtttgcatctcaaatgataatttaaagtttttgttagtgaaagtagggcagtgaccacacctttatataactattattaccttgattaattgctacattgtaaaagaaaatattttctacaattacagaatcctcagaacaactctgaaaacaaatgaggtattatccccaattaaaaaaaaaaaaaagattcaagagatttagtaagtacttcggcaagatctaaatatatggaagcaaattagaaacaaaccacatttttctgagctcaaagcccaaactattttctgcctatttcattatttcttctttcctggcccacactcctgtaagtgtatgtttcgtcttaatatatgatgtttgctttattaagtgcttgtaatgaagaatgcttgtcaattgagatcatatttaggaaatgttagaattgctgatttgttttgtgataaatattattaaaatgtaagctcaaggtaagctggatattttgtacgttttcatcaaagctttatccccattacctaggtcagtctgtgcctggaaaatagcagtgggtagttaataaatgctgaataaatgggatgtttagatacatttggccaagcgacactctcacctcaaatttgtgtgaaaaatcaccccaagaaataaaaggcaattagagacaattgaaaaattaattcagctgatagaaccacttgtcaaatattacataattcagaacaatatgactgaatcatgatgaaggctaaaattctgggtcttaagcaactttaaacctttcaaggaaaggctgattgacaaacacaccttctgtgtttaatcaatgccacaaaacatacggacccaagaattggtggaaatctagactcatcttcagaatggtaaattattcttgagttataaggcctccattgcctaagtgactaaaatgtatgtttccagaaagatttagcattttcctacaggttattatatgcaagaaatgcctttctccaacaggtgatagaaaggtcagaatcagccatctcctaagatactttattttattttgttatattgcaataatatgcaatgcttcagtgttataccaatgaaataaaatgataaattataatagcagtagctgagctttccaagattatacaaattaggtttagaattgaaattttatgaaaacaataatattttaactgcggatagaatattgaaagtgacctatgctgagagaaaaaggagaaaatttaggttacaaaaatatcagatgcattaatccaacataattttgtaaaatggttatcaaaggtcaacactcaatgtaatgtattataataaacaagaaaatgatggccatttttagcaaaaaaaaaaaggattatttgaataatccaattttattttacttagagacatttttcatataaaattagaatgaaatttatgttttaagctactttaatcatacatttttgttgttgaacaggatgctaaggtacagaggaaatcatgcttccaagttgattgccaaataatagtagcattgtctaaactcaactagaaattttgtcaatgcttttttttcttattgcccaaaatgatgcagtgagaattgataagataaggatattctgaccacgaggagtttacaatctagaaatgtggtcatatgcataaatagctgtaatacaataatgactatggcaacagtgaagaacaaaagagtgatctggcaataagaaaaaataagatttctgttccctctaaagaagccctttctagaactctagtgaaagttaatgggtaatcaatctaccatcacaagttaatgggtaatcaatctaccatcacagaaaaagtctagtctggagtgggtgacttcaagaaaaggtttccccatagcaaaatcaagtgtaactttccaaaggctttgagattatattttcacatctgtttttgtcgtttgcatgcatatagaatcacacatttatctctttctgttactgtgctatattacacaaaaacaactggttgggttttctcaagaggatattttggggtgacctgagttaaaatagaggttatatcatcatttaaattcactttgggcagccttagaagacaccccaaagacataggctatcatcctagagaatgctataactgctgataataagggacgtgccatagatattaagatgctaccgggagggaaaataaacagtgatttataacgcaagccctgatttgaaagtcacaaggtcagacacttggaattgcaggtgttgatttgtgatcaagaggtttttcacatggacaactctagaaagccttatgcagagtgagtaacagcacaaaggtactactagaatattggcaaaaattaacccaagcaatgcagagaccagatcactctgaatgtgtttctattttcatagatttcacctagtatatttaggttaaagaataaggcacaatgaaccttccctatctctaaaaaggaaaagaaattttttttgctttcattatcacttttctaaatactgagcagctcgttagtatcctcactctgatctataaatataaatataatattaatatatttatgatattaagtataaatattaaatatagccgtattaatatatctataatatttaatatataatactcattaatagataacgaggcaacactatggcattttgttccctatgttttaatatcttggagatggttatcttgtagtatgttgcagaaatgcgttatccccatgagagcctttggaatgtgatgacaaccatagtgtgggagccgacagagtcactgcttaggtgggaaatgtctaatagaaagaaaagaaaacttagaacatagctttgaggatcttgtattgaaggatggagaagacagcaatctgagaaagtgaccaaaaatatccaggagaaatactgggaggagtgtagggtcctggaagtgaaggaaagagaacgtctcatgaaagaaagggaagcgaggcacagtggatggaggcagctgttggaaacaccacttgaattacttgattgtagttcaatcagttttcaaaccccagtgagggaaaacctgagatgtctgtgggttgaggagggaatgaagttgagcatgagaatctgaagggagaaggaaggcaacgacggctcacagattcctcatcaccaaaggaggggaggtggatcagggaaggtttgggcttagctttttaacacaccattgcagctatttttaagacaaatgtaagaaactcagaacaagagatcgcttataaaataattgaaaaaatacatagtttaaatcagttcttataaaacattgaggtgacaagattaatataggtcttgttacatttttatttttccattgttaagtgtaatgcaatttatataaatatcagtttcctttagcattacttttgcatgaccttagctctatgctttattcatatatgctatttcatataaatgatataaccctttgaaattcaatttagaaaaataccctaaagatattgtgagccatatttatacacagttgtataacactctccttgtactagagctggttttacataacgatttgggattgagttccttttttatgaatgcatttttgaatgccacttctcttgtaggcaagtgtatgggtattgtatatttgtccctgatgtagattataaatctagatttataaggcatcattaggcctagcagcccaagttttcatatctatttcttcaagacaaaatatttcaacattactaataaatcatgaaaagtactaacataaggagactgaaataatttgttaaatgttatttttcaaagtaaaacaatttcactcctaggctttagagtcaggaaaacaaacaaacaaacaacaaacattgtttaaaattatgggttcttccatgttacactgatactaccatatgacaccccgagcttcagttttcttatctgtataatgtggacaatcatcattgcaccgaaagaattcagtcaatgctaatagagtgcctagcgcataggaaaactgtcagaagggtacctttagctgcaagtaatggaaaccccacttaagtctagcttaaacaactaggaaatttatttgctgacataatttggaacatgagctggggaaacagtcatgattgatttaaggagtccactttcctttccacagtggtgcattcctttatttgcttgttgtctttggggtaccccttttatgttggctagttacagaaatctacattcacatcctcgcactacatcattcatcagaagagagtgcattatttccataagctctcttgttgtagtaaggaagctttttcttccagaagccggccctgcccctacatttcccctgtgtctcagtggcctgaccgtgctcacttctgaagcaatcctaatggctaggagaaagccaagggcctattggccaatgttcttaaaccaattattgcaaaggttatgggattatccttagggtcacttttggggttgtaggctgggtcagattcttatgtatcactgtatgaagaagggaatgatactcaaaaatattagagttaaattttgaataatagtagggcactgatgaggcatcaaagtgacacctatatttaacctgtttggggccctattccttcacaccaaagaaggaaaccaaagcataagtcccatctgagccaattcagttcatgcgttgaatcacaatatgttggtggtcctaaaattattggcccaaagttgagtatcttggtgttttgttttgttttgttttgttttgttttgttttgttttttcggagtcccactctatcgccagactggagtgcagtggcacgatctcggctcactgcaacctctgactccctggttcaagccattttcctgcctcagtctcccgagtagctgggattacaggcacatgccaccacacctggctaatttttgtatttttagtagagaccaggtttcaccatgttgtccaggagggtttcgatctcctgacctcgtgatccacccacctccgcctcccaaagtgctgggattacaggtgtgagctaccgcacccggcctaaacctgagtatctttgctctctatcattcccattttcagcacccgagccttaaataaggtaatggaataaaatgaaaaacttgtgcaaatgctttacaacatagttaggtaagtttatctgaaaagataaactaatttcctatatatgactttgttacattattctcctatgagtgtcaagttattttaagaattcagagttacctattaaaaataaaattgacgagttatcaaaataggcctagaaatttagaacatggctaaaactcatctgtacgaaagaaggaaggaaggaaggaaagaaagaagaaagaaagaaaaagaaagaaggaaagaaagaaaggaaagaaagaaagggaaagaaggggagggaaggaaggaaggagggagggagggaaggaatgagagagagagagaaagaagagagaaaaacaaagaattggggtggtcgtgtgcacctatagtcccagctactcaggaggctgaagtaggaggattacttgtgcttgagaggtggaggttgcagtgaaccatgatgatgccactgaactccagcctgggtgacaaagtgaggccctgtctcaaaaaaacaacaacaacaaaacaaaacaaacaaaagaaaacaaagcaaaattacaagctgtaatttcacacctgtggtatattttattttgcttaaacaatatgctttaataaatatatattgaaatgacagaaaaataatattttaaaatgtatctgggtctacacattaagatttagtttgcagtattccaaacatcatttaatggaattaaataaaatttccaaatttataaactaaagaagtgctgctttcttatgaattcccactctaaattcattaatttaagatacatgtggcctttctttgtaactttaatatttaaggaaaattcagaatacttagcctcatccttaatcaaagtgtaataaattacaaaccccaccaaaatctctacctactgaaaacttctaaaggtaggagagagtatagagcctacagctgactccctacaatattctacatagcaaagtgaattaatattaggcttaacataaagcatctgttttctaccattgacatttacacacacatacacacacactcccccacacatatagagtttgttagggttcaccaaaggtaattaaccatcagatgtatattaatcacacacacataaacatgcacacatatgtattaactaacacacacacatttacaacaaaatagtagacagaaaaccattataagtgcagtttggtaactttaaggacctttgatgagaaatttcaaagttggtgacagttcatatgaggaagggtttttcctctgacaatcagatgagctaattaatcagcatttgacccggctggatcttagccagcctaactgttaatgagtgtgcactgttttgccagcaagagcacagtctcttcaaaaaataattgtcagggtcatttttgctatgaacaaaatcttattttgaaatgtgctagacttttttaaagcaacaataagaatgacacgatcattcttaaatatttcttattaaatattatggtaccaccaaacatgagcattgttttatttttttttttttaacaaactcattgctcttcatttatagttttacattttaaagtcatatgatgagaactatttcttccagtttgctttctgctgccaccagacttgataccacaaaaggtgtctgggtgcatgcctgtgatgatattgccaggccgttcctttcttggggcctgtgtatacatgggcctgcctttttattagcacctattataatatatggccattaattattagctgtacatattttctactagactgtcagctccttggaggtacaaaacttatttttctcatttgtacagcctctccgatatcttttatcaacttcatgtaatcctgatagctcagtgaggaactgaggagtggggtcccctaagaaggacataagtctaatttttaaagactaggtgtagggctgcagcttggctctcagctgtgtatgattccaaacaccgaagtatctccacgtcatcaccttttaatcacattttagtgtgatttataagcacatatttggaataccaccacaaacacacacatacaaatgtcattgttatttatatgcacgtatgatggtaatatatatgtctgcaagtttgtgtgtgtttgattaatatacatctggtgattaattttctttttcatttttttttgagacggaattttgccctaatcagccaggctagagtgcaatgtcatgatctcagctcactgcaacctccacctcccatgttcaagcgattctcctgcctcagcctcctgagtagcctccggattacaggtgcacgccaccatgcctggctaatttttatgtttagtagagatgggggtttcaccatgttggccaggctagtcttgaactcctgacctcaggtgatctgcccacctcagcctcctaaagtgctgggattacaggtgtgagccactgcgcccggcctgatgattaattttcaaacaaaccgtgtgtgtatgtgtgtgtgtgtgtgtgtgtgtgtgtaaatgtcaatggtattagaaaatagatgctttacattaagcctgctatggattcacgttgccatatagaatattgtagggagtcagctgtaggctctatactctctcccaccttcagaagttttcagtaggtagagattttggtgtggtttgtaatttattacactttgattaaggatgaggttaagtattctgaattttcttcaactttaaagtacaaagcccacatatatcttaaattaatgaatttagagtgggaattcataagagagcagcacttcttctttagtttataaatttggaaattgtaattaattccattacatgatctttggaatactgaaaactaaatcttcatgtgtagactgagatacaactttttaaaatatttttctgtcatttcaaaatatatttattaaattaaaatacagtctttaaacaaaacaaaatataccacaggtgtgaaattacagcttattatatgtatttttttttttttaaatttactctgtcaatcaggctgaggtgcagtggcattatcactgctcattgcagtctcgacctccccaagctcaggtgatcttcgtaccttagcctcctgagtagctgggactacgagtgtatgccaccacacctggctattttttaaaaatgttggtagaggtaggattttgccctgttgcccaggctggtttccaacttgtgggctcaagctatcggccggcctgtgcctcccaaaatgctggggttacaggtgtgagccactgtgcctggcccacatatgaaattttgaaccaacaatcttctgagctctttttatagaaattgatgtaagatcacaattatttagtgatctgatatattttagctgctgtctataatatttggaaaggatctgcaatattaaactgctttacatttcagttataaaaaaaaagttaaaatttcatgtcactataattattacaggtcacctcattcactgtctttccttttccttagcatccttagatagccacagaacatttccttaaacatttcttgttacttatttcacatactcacaagttcccccattccatttctagaaagcttttggaatgttttataaaacagtatgagcattattgctgtaagaatgctattgaaagtggagtgtaggtaggcttactatacaaagtggagtgtaggtaggcttactataaaaaacaaggtatactaaaacactcactgctataaaaaacaagcctcaaagacacatgcacatgtacgtttattgcagcactattcacaatagcaaagacttggaaccaacccaaatgcccatcagtaatagactggataaagaaaatgtggcacgtgtacaccatggaatactatgcagccataaaaaaggatgagttcatgtcctttgcagggacatggaagaagctgcaaactatcattctcagcaaactaacacaggaacagaaaactaaacactgcatgttctcactcataactgggagttgaacagtgagaacacatggacacagggaggggaacatcacacattggggcctgttggggtttgggggataggggagggatagtattaggagaaatacctaatgcagatgatggattgatgagtgcagcaaaccaccatggcacgtgtatacttatgtaacaaacctgcacgttctgcacatgtatcccagaatgtagagtataaaaaaaaaagcccccaaatatataatggaatgttgcaatgtaagtttatgtgttattcaagtgagattaaaaatgtgtgttcctggtttgcagaaggcaccctccacatgatagaggaagcagagttttcctttggttcctctgcatccacatagtataccaggaagagaaagaatagaatagagcacaaaagagattttcatgagcttttgtagaaaaagcctgagcccctttcactcacattactttggccagaactcagtcttctgactctgtctacggaggaatgaattttagctgtgtgccaggaggaaagaagaacaggttcatattagctttccggcttcgttgtcttctcacattttgttcccaccacattgacttttctgtttgttcgtttgttttgttttgtttccagaaggcactacagggtcatgccacaagttgtttcttctacaaggaatgcggaatgcttcccactttatgcaggttacccagctgacttctatttttcatttaaaactcaattcaaatatttagttatcaggaatgtctgctctaatatgatacatattattattcataacacacaatttcaacatcagtgagaatttttttgatgaatgtttatctcccgaagtagactgcaagtttttaatgacaatgatcatgcctgtccaccctccattattacacagctcctatcaaagtcaatagaatatgaaattatgtttttaattaatgaaagaaaactccaccctccaactcttaatgacagtacaggttgagcatacctaatccaaaaatctgaaattcaaaatgcttccaaatccaaaactatttgagtgccaccatgacatcacaagtggaaaattccacactggaccttgtgtgataggccgaagttaaaacacagatgcacaacacaccatttattcagcatccccaaagacaaagagattctctcagcctccctgagctgtgatatgtttctgtgcatgcccaggtttccccatgcaatcacgcccacaaatggtatcacacagcatggtaggcagagactgaaagcttgccattcttgattgttgctgttctttaacagctgatacaggtattctggtgatgctactgtgttagtcagttatcctggacacattgttttttcttatattaatggtatgttagatttttttactgttaagttctgacatgtgactaagcataagaaaatgcttgcttattggtagcatataaattcagagtcaggaatgatagtgagagaaaacaaccacagagaaaacagtccacaggtgtggctgagatagtgatgcctctgctttctgatggtgcaatgtatacaagctttgtttcatgcacaaattatttaaagtgttacataaaattaccttcaggctgtgtgtatatggtatatataaagcataaatgatttctatgtttatacttgaattcaatccccaagatatttaattatgtatatacaaatattccaaaatctgaaacactttttgtcccaagcatttcggatgagggatactcagcctgtactcccatacaatgaggccttaaccacagaagaaaacaataggttcttcaaagaaattggttgtgacatttaaagggtcaaaatgggtggtaaatgtggaataataattgagaaatgtaaaataattgagaaaatagccaagaatacctgagtatgaaaatagatgtgaaattttagcagtctatcaataaaatcttgatcaaacaccacttattcagctgccatatatgagtgtcaatgaggagactgtagagcagttagcatgatttttacattcagtttattaggtagaagaaaccctgcatccattgtcaacattcattctgaatgcaatgtcactatctattttattggcttctttttcccaatgcaatatttgtgatgaagtgttccccaagttatgcttttatcttctttgtgtccatctaattctttgtgggtgatgtccactactctgacagcatcacctatcataaaatgctctggatctataattccagtcctgcctgagtcctgtttctgcattttctttgctgatctttactcaaagatgctctgaattcctctgaaacttaacctgcctcaaattaaatttaggataagacttctccttttcaatatccttctcctccagtattctctgtgttaattcagagtatcaccatccatcagttatcaaagccaaaagagtcatttttcatttcctctgacccatttgccatgaccaagagaagaaagagcttcagctcctgagcctaggatgtctgtttttgccaattatgccaatccaaatccggctgtcatgaaacctggatggaaaaaacaaagccagtgccagctctgttcagtaggatggaaaatctctgtggcttggtagcctcccaggttcctacagagaaggttcattctgagatgaggatctctgtggcatatggtcttcaggaggagaatatctatgagaaaagagtctccctaaaccagaaaaatgagaaatgcaaagaagatctggacaaggcagtggtggaagtgtcccctttagatatttggttagtgctggcattactgcctgtggaccagatggtcccaaagttactacacactgcactgtatgcctgcctgctttcctgcctgctccagagtctactgagaagctgtattatttgtggatgtatgtgacacagtctctgcactgtagttataagccatgtgtcgctccaattcctaagaatccagtcattccagagattactcctcatacatgaaaatcctccagattcctactttctgataaagaaatattattgtgaacagatcagaaccaatgtaggaattcaacctcaagttcaaaaaaatcatcttctagatcaaaatgaggaaagactgcaatttaccattcaaggcaaaaatatccatatattgtaccagacacctattaacttcaataaggatggtcccaggttcaagagtgaggagaagagacccacagccagtgaatgaaacatggggtttatttgatggggacatacgggacagtccagtggtggcaggctggacagaaccgctacagcttgcaaactgcatgcagtttatgtagcattttcacttagcaccctctccttagcaacctccaggttaacaattcatttcttaagttgttattgctttcaggtatgtctgccatacagggtcgttctcggggtatgcttaagttattgctgtcaggtacatctctcataaaccatagtaatccagaccaagactgctcccttccacaggccaaaacctccaacttcatctttctctgtcccttgcaggggtatagttaccctgtttactatgtttattattattattattaatattattattattatttatccctgactggtgataccctgaaagtcttcccacctgagagcttggttattgcttccaaccccgggtgaacccctaagctagaccagtccgttagtgaccagattccagtgaagaagggggcagttggcttgcatatatggttcatgttgaaccagcccttcatgttcctggagctcccactaaggggatggagaagggatcaggaaagagggttgaatgaagaagagaaacacgtataaatgtaaaaacatgcatctgagaaaagaatcttagccccgttcttaaattcagaactctatttttgtgcttttaaacctgtcagtcctcagcgtcactccctccaccactgccatctcagccctgaagcttcctggtttcttcacagaacaaagatcagtacttggaatgtggcaagtactcattaaatgttttggattgtgcaaaacagtcacaatcaattggtacctctctattaatgctcccccacctctgtatctctgctcatgctatttctcatttgcaatgctcatccctccttatttctcctttgaagttttattaatctcaactgaaaaaaggttttcttcttgaccaaactccaatcaggcttccctgaactctttttcaactaggcctgacttttagacgcctgtgtttgtgtgcattgtctaattgcagtaagaatcttgcagagttggtttaattttagcaagactcttgcagagttagtttagccaggttctcccatgcttcatatctgatcaccatcaatatctaattgggttccccaccctccactatcctccaggtgatgtgaagggaatgatatctgatgaccctggcctgtcttcagcaagaatcctcataggttagtttaaacagaattcctccttacttctaatgtttcttctaagtaattttccatccactgactcacatcgtgctttttggctgtaattccccctcattcatgctgtatcaggaattgaacccagttctgttctgaggtcccttttaccctattgcaataatactgaatagaatctgtttctattgccttaactaccgtccagttctaatgttatttgatacaataatccatcttgtcatgttccatatgtagccttccaggcttttccagatgagcctggcttggtaatcattatctcttctaggatcttacagctctatttggtgtttgcacgtctattactttattctataactgattttcttactagtgtttacacacacacacacacacacacacttttcataaatgtgactccctataacccaatatacattttggtatatttggatcattgagtaaatacattaaactttttgttttcttttttgtctcaaaaacttacaaatcatctggcttttaggaggtgatttgtacacaaattacataaaaagtgaatttctttcatggtgttaactgttgagaaaatcttacgccaaccttttcaggagccatggtggttccgagatgctttaaaaataaattaccaatcctctgtaattttgcgtcctctcatctcacctactcataataaatgaagagaagatatgtcatgcctcacaggcaatcatatactgataaatatttaatgactggctctcaaaaaatattaaaaataccaatttgtagtgtttgctgatttttatgatataaatacacccaccatgacagatgcctaattaccaacatgacaacgctgaccctggagttaggaagaggtgtgtagtgacacatcatcatatctttaccatccatatatgatagctgtgaataaactcgaggacataagtcatagtaaaatccaatttttaatgatggatatgtttaaccactggcttgaaacttcctgatatttaattataagctctcaaccactgtgtgggttggctccagcacatcagaaaaatggattgcagcatattcagattatataatcactctcagtagcataacaaggatattacttggcataaaaatttcataaattgattatagacccgtgttatcaagaaacatactctatatattatttcatcactagtgttccttgaaactgaattttacaaggttctaacattgtcacatgcctcaaatcatcctccaaagatactaataatctagttattgagttatataaatgtataaggaaggtacgtgggaaaaatatataatagtatgaatacatggaattatgttgatcatgaccattattccttaagaggaatattatattttcagaaagatttgaagaacttaaagcttatacctccagtggcccactaattcacagtctaaaatgacagaacatgataaatttcaatatcttatacaatttctcatagcctctggcaggagcaattcttgaaacagtaggtggaaatatactcattaagctgcaaaattgcctatattcaggacacctgccaagcaagcattccctaaattaccacctgttaccataacatcaaagacatccaaaatacttgcttactaaatctagtctccctaagtatatataattttcctataatgctgcttgatggtagagcagtatcttaatttcatatacataaatcaaagttgtttctggacagctagggctcgaacctggttttcaacagctattcctgaggtatagttgatctttagtgttctatttgatgttgagttatagtcacactttttaacttgtccaggtgtaaatggtagttgctgaggcctttatataaagcaaatttactatcactgatacatgaaagaaaatcattttactgatattgtagcactgaaagttgtcaatggattatctaagatgattagaagctgtggataaattagtagtaggccaatatattttgcttgagatcatgtgtcaatatagcagcatgctccggagcagacatctataactaataatcatataaattctgctatatatgtctatagtcagtctatccacatagattttcagtcactgttacattcagtaaatagaatgtaacaatatcatgtggaaacttggttagataattctgcaagacatatcaaatggatgagtgataagaggaaaccaactgctttatgacaagctgaggtggagtgaattggtacaaggacacccagaagcacaatgtcaggtgatgaaaaggctgtgtaataatgagaggaaacagtaataggagaagaggaaataattagcaatcagaaacatcgtgattagaagagtgcataggttatgagctgatgaggctaagccctaaacaccaccactttttaataaatgtgcctacattattacccaaaaagagttctttcaaagaatttttggccacattcacccccccagcctccaagaaagagagagatagaagggagacagagagagagagagagagagagagagagagagagagagagagagaaattgttgaggggctaatgtgagccatggtggttttattcatcactataacagtagtttagagactacaggttcaggggccagacagcatggattcgaaagtgagcaatatcatttcttttgtgaccttaggcaagtgacttaaactctttatatctctgtttcctcatttgtgaaatgctgattgaaatgatatcatatttcataaggacattgtgagggttaaatggaataatgcaaagaaagcccttggcactgcctactgtgatgaaactgttccaaaaagtcagctattattttcatccccactgcctaatatgtagggtgtcagtaaccgtaaataaatgttgaggttgaatgaattcacattaccatccaagatactttcaaaaataaccaggaaaaaaggcatacatccctttagaggaagatgaagaaaaatgttattgcagcacgggagagcactgtattcttattaaggagtttatgttctggatagaacttcataggaggcatggcattgatcatcactggtcttttatcatcattatcattatagtttggtggccgttgttggcataaatcaaaatcatagaattgtagatttggatgagagtgtaaaggttatttagtgtgctttactataatacgatcatctgctataatatccgtgagcatgtcacctctggtcacgtatccacagagaataatctcattgttggctttagaaataaaataaatacctgagagtccataatggcaattttaaaaaaatgaatacattgagcataaccacaagcataaattatatggcttaattattttgacacgcacacacatacacaggcacatgtataagttttatatatagaagtatatataaatgtaatatttgccctttcttggtgctttacataatactcatgcactgtttcactaatcctttgtcttcccagaaccttagttatatttagcaatgttatttcacaatttacaaaagaaacacaacttattttgactccgacattatggacatttctggggatactgctttttggattgagttctaaagttggacataaataattagatcaacattgtggagaaaatatactataatttaaattttacgttgttatttttattaatgtgggtacaataaaataataaacatgacagcattaattaaactatgaaatagcatctcacaaaattgctaaaattataacaatcagcaaaatcctctctactccgaacctcttctcctagagtcacatgcatcttttggctcctgtttctcctctgaagaacactgcagccttacaaggtcataactgtttcacctcctttaaacttccaggcatacgcatgctcctctcttcagtcacactcacttggataaacctcagctcacaccaaatccagtccctgcctactctgtttaatcatggaggcaactaagtcaggctggagaaaaacatgcaactttgatgacttgtctcactgtgtttcacgaccattgaattaaatgggctgtttctgctgtctgggcaccatcccattcataaactccagatgtcaacacagcaattgtctcttcttttttctgtttctcgattttacctttctactctatcacttccatcgtcataataacatgctgttatttttcctttcaaataagaataaaaaaaaggaatctcgatctgacaggctagttgagttcctgcctatttctctgcacgtcttttggtagatctcctggagagttattttttatactcactgtctgtactgtttcctgctgcaattatgttttgaacacctcaagtttagcttttgtgctcactactctatcaaaatatgtcttgtcagtgttaccaatggttttcacatggctcagtccaacagtcaattcacattcctcatttatggacctatcagaaacatttaacacagttgtcctttttttctggaatacttttgcttggcctctggaaccccttccctatccacttctttactgtctcattggctggaacttcttttcctctaaaaattagagcgcctcagattttctttctcaaacttctctatgtaaatcactctttaggtgatctcactcagcatcatggctctaaatattatttatattctgaggaaaaaaatacatagatacctttactcagaactgtttcccaaactccacattttcaaatccagacttcattttctccacttcagtgatgtaaattctcaaatggagaatgcactaaatgcactaaaaatgaaaatccttccaattccccaaaagcctctttgttccagttccccatctcattaactgacaattccaaccttttagctttggtcaaaaatattggagtcagtcatttttttcccttcactccttactttccctgtcatataaaaaataactaatcaaaatatatgttgtctctgccttcaagatatgtctagaatctaattacttttgcactaccaccattgggcaagccattttctcttacctaaattattgcaataacttgctacctgttttctcttcttctgccttgaacccatgaataatctatgctcaatctactagctaaaataatcattcaatattagagacacattgtgtctcttctctactcaaagccctctaattgttttctgtcaaagccctccaattattttctgtctcactcataataaaagccacaggttatacaatgcctcctataagtctaacatggtctgggatcccgtatttcctctctgatctcattgtgttctactcttcttcttgctaggcatattctacctgtgcctagaactatccactttccttcctccttttatgtctatacctaaatatatccaccaatcaggccatttccctgatcatcttatagataaaaatctgaactccctttttccccgccgcccataattcttctcctccttatattatgctttaatgtattccagcgctcacaacacttggcttaccatcagctttttggttgcttgtgtgagccctctcacacaaagtttagatagctatagagacagagagccagaaagacgacagacagagatagatagatagatagatagatagatagatagatagatctctagttttatgtactactgcatcgtttgtgcttacaatgcctagaatataagacactaaattttttgaatgaaatacttaagaaattaattatgtactctatgcttttgatggcattctgtaaaactatgtgtaaaatgttgatttatagagatttatatttcccgttaatttccgttatgctttctgaaacatgtttctctggggagtgaaatgaccttaaacatacttaagggttagtctaacatttatctttgagagcattttctcttcggaagctggccacctagacacattaatttttcccacacaatactggttaaagaggtatttcagtggctagcgatcctcaaccattcgtaagcaacactccataatagtcagttttcaggagcaggaaaatgaaggctaatcctagggcacccatgatacctggctgtgctaagtagcaaaattacgggcattttcttttcattacaactcacgtactgcaaatatgttatctgcattttgacattaaattatattgccacataaaatatgtttaaataatcttatttttgttctcattagtacccaacttaaaaatacttacaaaatagttaataataaatactttaaaaagacgttttaaaataaataaaaataaacactttaaaatcgctcacaaagcactactttcatttccgatgcattttttctccattttttgcacacataatcatattctaaaaggtgaggtggaaagagttactggtcctaaaatatctgtttgtaatgttttgattatacttgtgctttgggtgtgtacacgtttacatatatgcatatatgtgtgtttgtatccaggcatgcgtatgtattctgtacctttttagtacttgtattgttgcatcgctgaatacacaatataatttttacttatcctttttatgacccatttgacctccatgagaaaacatgtggcatattcccttattcatctatgcatttccaaaacctagcttagtacttgacatataatagctggtcagtaaatttgctttattttatactgaaatatattgctctaagccagattttcacaaattgttatgagagatatagtaattctgcaatatgtgagtaataatattctagggtttcacatacagaataatctgaataatgaactccctcttgggatgctgtaatgttcattaacataattatactctctaagaaactaaaaattaccaacaaaaggcaatcgttttaacactgcttaagatataaacaactaattttcccatttccttttttaaatatatctcccctgatatcttaattttagaagcagattgcattatgataaatacttacagagtgactagaatattgtttggcatagatctaggttgataatgacattaatgaactttgcaaaccgagttcaattccagaaatgggtactgtacttttctgagaaattgctatctcatgtggcagataacttatatatatgaaaaagtatagtaagaaatttgaggaattttgacttaaatgtgtgaagaatttttataattgctgtgcctacagtgaaaatggctattttgtcacctaaacagtcagggagaacttggaaatgtgaaagtccttaaaattctactgcttactgtagtctcagtatgaaataatgtaattatgtttacttgtaagttatcctatggttgcagataggaagactcgatactataaatatgtcaattcttcctatatcaatccatatttatgttaatataaaagtaaaaaataagccaacagtgtgtttgaacaaaataagcttattttagagtttatatgataaaagaagtatgcaaaaaaatctgcgaaattatgttgaagaaaaacaacatgggagagctagctctataagatattaaaacatataaagtctcaataaatagaacagtatgatactggttcaaagaaacaaaacaggaatatgtgcaaatacataggaaaaattattatacataggaaatggtatgaatgcaaaaaaagtagaagaattaagttgactccatataccatttcttatacaggcaaaattccaagaaaataaaagatctaaatgaactaaagtggtagcaattagaagagtgaatataattttaaagaaagtaaaaaaaataaataaataaagattgaacccaaatggatgtacaaagcattcaaaacaagaatccacaaaaacttgtaggtaaagacaaatgttttattttgggaataatgcagaaaatggtatcaaaattgacttgagttaaataatcaatttgaagttgtggaaacctgaggatgtcatatgctcagtatgaaaactgggtttgatgttagggaaagatgtatgttaatttgcacggagacccttaagattatatgcggctatagagggaaatgtggctatgatcttaaggatgagtttttggcggcatccactgaaaagatgtaaaaagtaggagagtaacttgagtgcatagactaggcatgtcaagacctcaagggaagaggtagtttgaagaatttattaggtgatcaacagcatctaatgttgcaataggtgtttattcatacagagtaagataagagatagaaagacagcaaaggaaagaacatgcagggatattgcttctaagttttccactatgactttcaatgatcttcaatttccatttccacaaagaatgtttacttgatatttaaaaggaaattaattgtaggcatctcttatttcctttgtattttaatgagtcatcatttcaaaacttttgtcacatgtcagtgttaaatatgacataactacgttgcccttgatactagttaaaattaaattttttactgattggaaaatacacatagtgatttatttcagagggtaaaaaatattatactaaagtctattaagaatcagttgtgctaggagtctccttcaatgtgtttcaaatatttggtgtgttccaaattaagacagagtggagaacgaaaactttcaagtttgaaacaccaaagattgtataggatgggggagaccaaatactattaaaattcaccagggtcattctatcttggaggtctcttaggaatccatgttccatctcttccgttattcccagataacagcatgattttgccattgtcttcaatttccagatgcattagaagtgtggcaagatacaattagagtgtgtaacttaaatgctagtaagacctattcaagcaagcatagggctctgcacttacagaaatgtacaagtaaatctaatttactaaaatatatttagtacatgtaaatttaaaatattgcgatagctgggcgaggtggctcacgcctgtaatcccagcactttgggagaccaaggcgggcggatcatgaggtcaggagatcgagaccatcctggctaacagggtgaaaccccgtctctactaaaaatacaaaacattagccgggcgtggtggcgggcgcctgtagtcccagctactcgaaaggctgaggcaggagaatggtgtgaacccaggaggcggaacttgcagtgagccgagaccgcgccactgcactccagcctgggggacagagtgagactctgtctcaaaaaaaaaaaagatacaaacaaatggaagaacattccatgctcatgggtaggaagaatcaatatcgtgaaaatggccatactgcccaaggtaatttacagattcaatgccatccccatcaagctaccaatgactttcttcacagaattggaaaaaactactttaaagttcatatggaaccaaaaaagagcccgcattgccaagtcaaccctaagccaaaagaacaaagctggaggaatcacactacctgacttcaaactatactacaaggctacagtaaccaaaacagcatggtactggtaccaaaacagagatatagatcaatggaacagaacacagccctcagaaataatgccacataactacaactatctgatctttgacaaacctgagaaaaacaagcaatggggaaaggattccctatttaataaatggtgctgggaaaactggctagccatatgtaggaagctgaaactggatccctcccttacaccttatacaaaaatcaattcaagatggattaaagatttaaacgttagacctaaaaccataaaaaccctagaagaaaacctaggcattaccattcaggacataggcatgggcaaggacttcatgtctaaaacaccaaaagcaatggcaacaaaagccaaaattgacaaatgggatctaattaaactaaagagcttctgcacagcaaaagaaactaccatcagagtgaacaggcaacctacaaaatgggagaaaattttcccaacctactcatctgacaaagggctaatatccagaatctacaatgaactcaaacaaatttacaagaaaaaaacaaacaaccccatcaaaaagtgggcgaaggacatgaacagacacttctcaaaagaagacatttatgcagccaaaaaacacatgaaaaaatgctcatcatcactggccatcagagaaatgcaaatcaaaaccactatgagataccatctcacagcagttagaatggcaatcattaaaaagtcaggaaacaacaggtgctggagaggatgtggagaaataggaacacttttacactgttggtgggactgtaaactagttcaaccattgtggaagtcagtgtggcgattcctcagggatctagaactagaaataccatttgacccagccatcccattactgggtatatacccaaatgactataaatcatgctgctataaagacacatgcacacgtatgtttattgtggcattattcacaatagcaaagacttggaaccaacccaaatgtccaacaatgatagactggatgaagaaaatgtggcacatatacaccatggaatactatgcagccataaaaaatgatgagttcatgtcctttgtagggacatggatgaaattggaaatcatcattctcagtaaactatcgcagggacaaaaaaccaaacacctcatattctcactcataggtgggaattgaacaatgagatcacatggacacaggaaggggactatcacactctggggactgttgtggggtggggggaggggggagggatagcattgggagatatacctaatgctagatgacgagttagtgggtgcagtgcaccagcatggcacatgtatacatatgtaactaacctgcacaatgtgcacatgtaccctaaaacttaaagtataataaaaaaaaacaacaaaaaaaaaaagaaaaaaaaatactgcaatatcttcccgccttttacactgttttttaataattattttatatcctttctaaactgaaagttccatggacatagagactatgtcttgtttctttattgtattcatttcactgtatggctagaaactagggctggccattttgtgtattattgtacttgttccatatctcatattatcagatgattgatattattatcatcattgttttcattttaccaatgaggaaatggattcagagattaaacaccttgctctggatcaaacataactcttactctggaagccaaattcttagccacctcatggtgttgccctagtacctcaactgtattaatgcacttagtatagtcatgttatgcagaaaaaaggactctaagatggtggagggtctcagagccaagttatgtcactaatgaactacagatattcaatgtaaattcaggaagaaataagagaggtatgtaaactctcatgaatatttgaggtttgccatatcatggatgataataatcatgctgaagtattatttctgttagtattattattttaattattagcatttgaatccacaaaaagaagatagaatgaagtgtggtagatgtaacacattttaattcaatagtgagcatagttgaataactggcatagtgatacgactgatatgattcatctttactgctggtgactaggcagatagtagatgattatctgtctcgaatgctgttgaaaagtctaaaagtgctgagctaacttcttccaagtgttatgaatctatggaatttagtatagtgctcaacatttatcatgttgagaataagatttccattgacttgagaaaagtaaaacataatctataaggcaggaatatcagctgttgttattccctaaggtcaacttaaatgtaaacctctgatttacatagaacattaatatgtatgtatacatttttagaagcagatttgattgcagtcataaatttgctaaagtcctaaatgcattgttggcatccaaccatttactgttttggcataattattaatatacttactattattctgcctatgaatgtgaatgagtgtgatatcagaataattagaatgagtcatattataaatcctctgtccaactttgaattatattgtatgtatgcttgagcattatagatgtaaaaagtgacatgagttctacatggaatataatacaagtattacatcaagacattttcatgtagattattttagtagtcgtagaattttactacattgaaggaattgatattatgacatttttgataggcaaaccaagagtgaccctttcaaattgtacaatgtcaacttctatgaagaaagataattgaatattgttatttgttatttagaagattgaaaaatttcagtcatattgtcatagtctgttgattgattaagcctagccataagtctataacattcatttttatgttttgtctcttttgtatggttatgtggaatcgatgctattactttgacctccaatatttaattcaacaagcagaaatataaccttttcacttgacaaaacccacttattttgcttgagaaattataaaacaaaaccagcaggtgcctgagattcagtacttgaaattatcatttaaagcaaagtgtcttgtatggtttcaacattgttcactccattttctggcagctgacactcatttactctcaacaagtgaataagcagtcggtgagtgtccctgatgtcaaggagctgtcataatttccatggagttagctctgtttggcattacagaaattcactgtgatcctgctgacaactcttttgtatagtcataaagtatacagcagaacagtttgtcccagggctaaggtcaggctttttattttgctattatgagaaatcaataaatacacaatactatttatcttatttattctaaggaaggaggagaccaaggcatattttcctccttctaattcaaaatatttctaacattattattagattagtactgatgggtcagtcagtactacaggaaaacaaaatatgtagaaacagtgatagtctgtcaaagtttcgagctaatttcaaacagattgggtaacgtttgaatcttctatggaagcattccccaatgtttaatcttcaagatatctctgaatttatcttcatcagatgttggatatgtcccatgtgtccaatgatcacacttctgcttgacttccagccccagcccttgctcctctacctggagttgcttccacttcacacacgaatgggcatttaggctgccataacccaaactcaacgagcctaaaactagatgggccatcttttgtttttctttttaaaatttatgtttttattattattttttgagacagggtctttttctgtcacccagactggagtacagtggtgcaatcatggctcactgcattctcaatctcctgggctcaagcatttctcccacctaagcctgccaagtagctgggattacaggtgcatgcatcatatctcgctaattttttaaaatttttatagagttgggggtctcactatgttacctaggctggtctcgaatgcctgggctcaagcgatcctcctgcctctgccgcccaaagtgctgtgattacaaacatgagccaccgggcctggccttcaccatctttcttcttaaatcacttattaacttgggatttgtcacaattttatcatccaaacctaaaattttccctcatgtgcttccaaaatcttctgaatttacatattctcttaatattctccttcaagtttaccatgcctcagtccctttacttgctttaatggtatttattcctttcttcattttgtaaaaaggacacattcatttaaaggaagcagaaaatgcagaaagattaaaaggacataaaaaccccttgcaatgttatctatatttaagcattattaatatttggagctaaacttcatgttctccatcttttaatgttaaactaaacaaatactttataaagtatttcttgatcatggcagcaggatgcattctctttttcttgctgcctgtcaatatcacttgagtggcatatacagtcctattgaagatattcgtgcaaatatattgttcctttttccaggtttaaaactctttaaggccaaggcacatgcttatacatttctttgtttaagacagatctggtacagtgtataatgttaattcaatatttgttgaatgaatatgcttaataattcagatctatttgaattatcaccgtgaataaacaagtttaattctcttctatagaatgaaaatatgtgtgagtaagctggttaggaggaagtgaaattttttattcagttaataatgacaatacagattacatgcttcagtgaagcaaattcctttgtataaagtacaatacattgttgggttcacaattgcagagtcataagaaaatgtatttctcctcatatttctctcttacagaatgtaccattcaaaataattgatgtaagtataaagaattgtctttttgtgctactaaaatttccactacttattttcatttgtcttcccagcacttcttctgatcaattgtatatttttaaggcttttggtattcattgttgatattccatttcattttatatgttctatctctaacaatttcatcttttttgggggatgatctcccttttttctgtgtataattttaaatttcaaatttcactgtctcagcaacatgtagtgtacatacctcttactttctcctaaactagtcagattgcatcctattttttgcagaaataattcaaagtttttcctctttataaataaaattatttccaagttagggaaataaagacagaaatccagccatactaaataagtagtactatagaactgctttcccaagaccatgcatacttggagacactcaaggattatggcatttgtcagtccattttattactaggtctcaaaaatctcatttactatttcctacttcaaatgacccaagtttcttcacattgatcatctaagttttgcattctttggttagagtttcatcaaaaagcacctagtgttgcactcacatgcatcttattctgatgatcaggtggtattgttttgtcttcttctgtagtgagcattatcggtatttgcacccaccccatagctgcagtagtatttattcacatttctaattttaggattgtggaatttttttccatcacaaacaaataggattttatatttttcttccacatagtccaagggtcattctgaaaacaggatttctcatgtgtcaccccaatactgcactgttatagtattctgctgtgaatactgtgactactaattcactatatctacatttgaaaattgaaacatcagtctgtttgctgttcattttgtgacaaacttaaaacacttgagctttttgaaggtcttggtacatgaatttttatcatatacctaaaaacactcagatactactgctgagagattttgggccatggtagaggtgtttgtccaaaaatagaaaaaagtaattggttaagaaatatatacaagtaaacagaattatttctaggtaagttttattctactcaataatacaaaatgcactttgcatggcattgttgtgagatgtccattataggccttcctacatttgattagaaaaagttatcataattctagatagtataggaatcagctggagatttcttaggtctaactccagaccagtggttcacaaagcatgcttataagaccagaaacatcatcacctgagtacatggtagataagtaaataatggtctgcaccccagacacagcgaatcagaaactctgagggcagagctctgcaagctgtgattgaacaagtctcccaggtgagttccatgaacactaaaggctgaaactcggcgagaaccattgtttttaaccaattaaaatacaatcttcaggtgagtcatatacactgccaaaattgagaaagcttgagaatcaccgaataataataatcatcattttcaggtggtacttggtaaatttacaaacatgtaaacctgtgggatttgcctagccagtcacacatttattaggattattctcgtgtagtcgtctcctaggagagagcagagccctgggtgataggaaaggcttgaaacatgagcagcacccaaacagagtagttttggaagacttgacatggcaggaaaaaggtgcacatttgacaggtaaggagaacctgcatgttcggaacctaaatattactggctttgttgactttgtgtttgtgtgtgcaaatttggagtgcaatgggataatgctaaaaatgtggcaagaatgaaaatactagagcataatgtaggtagataatattaaggtcagaataaaggaaaaatatagggaattcagcattagtgaaagtagttaatttaatattctactatcatctcaaaatatgacaatattttaaatcccatttttgagacatgattgcactttcttcttaatagctcctcctctaataatcttgatttatatctatgcaaatctagacttctaatggttccggttgttttaaacatgtaatctggtctctgaactcaagtagttattctagatttagaaacagtgctagtcatctgttagcactttaacacgtaaacctatcctgaattggaatatgttttgaaaatgttccatccccagagtaattttgttcttgccttgagcccctggtgccccaatgctgtttatacattaatttagtctcttatatgcttaagaagaaagtatatgaatgcaaatgagaaagtcccaacctctgggatttgaatctgaaatttaaaacaagctaaaagagcatcagaaatggaagcaggattaccaataacatttatgatttaatgatttcaggaagcattaaaatgatagttgtgtatttataagcaaagccgtttatgtattttgcttttacttatttcatttttgagataaggcctcgctctgtcgccaaggctggggtgcagtggtgcaatcacagctcactcagcctctgcttcccttgctcagcttcctgagtagctagggctacaggcgaaccccattaggcccagctaatttttgctttatttttttgtcgatacagagtctcactatgttgcccagtctattctcaagcccctgggctcaaggaatcttcccccttcagcttcccaaagtgctgggattataggcgcgagccaccgcacctggtctattttgcttttaaagttaataaactactagtgttttagttggaaaaaaaattctctcatgttatttgtagaaatgctgtagaagaaaaaaatacataatattatataaaatttgctgccttttcacatgtgaaagtatttgaggtctaaaatcaggtatatctgagggcaaaaaggcaaagattcatggtcattgaaacaggaatcttaagagactgtatctacaaagaacatttcttgtatatgttgtagacactttagcagtaaaattttctattttgttctctgtctcttcagtgagaggtacccttattaaaactctgcaagggaatatataatttaaattacatattttggtataactttaggcaagctttatagtagtaatgcttttcacatgtattgtgccttcagactatcttgatattcaagtagatcagcttagcctggaaatccagtggaaatatggattgtccacaggccaaacagaaagtcttcttttgcaaaatcacatgcagacttttcaatattgaaaggatttgttcaaacttccagttctctgatgatatatacataacatataaaaggttatccttgtccatcgatgagtcaaggggataaatgtgtaactaacactatctacaataaaaatatttttgttacatcagattacagccccaagctttatttaaattgacaacaataggactcatgtaatagtgtcgtgaggattaaattagatttagaatctaaaaagtaaaaagagcctagaataatccctagtagatacgacaaacatttaataaaaatagttattactgttaacagatatgtgatttatattagtaatgtaaaatagcatactctctcatactcacatggaccttttttcttgttccatgcaatatgttaacagcaaaactagtttacaggtgagaatgacaagaagatgtgaaagattatttcagctttccctttctttaaaaagctagcatttcaagacataatttttttaaaaatgaaaattctaaattgttacttactttaaaagtatttaaaagagattctgccaatggtttaatataagaacaaaaaggagtatttttcaggaaatcaagccagagattatgagtatccattcttgttggcagaccttatttgcttattttaaaggcagtgagcaaaagatgtagaactccaagagacagacgttgattagaagtttttctttaagatgtcatttttattttctgaaaaagcatttatttttaaaacttggcacggattattaagacgggtacagcttaaatttcccattaaaaaatcatatgtcattcccaaacctgttcatatacacagagaaaaatacttaggtatgtactcattactttggcctttccttaatctgaaaaatttttttataaaactgagtatttttgtgatgttgctccatcagctcatttaaaaactactatatgatcttgttcaatgttgtttaatcttaggaccactttgtttcacttatagctctaacatctgtcttttttttttttttttgccacaaactcttttgtttctgtgtttagtagctatccatgctttttgtcctcccactcactaccaattgctctcaatatgatgacaatttaagagaattgtagcaagctaattgtcttccttatattttccctatctatagatttgtttactcaaggagctctatgagaagtgtcaggcatttgcagagacaaattgtcttggttgcatccaccactgttaaaacctccaatgtcacagggagacttgtctgtaatttctagagtcactactggaagtctttttatgaacacaggtcatcattgtggccacacaaaggctctggcactaaagaactctgatagacaatctataagaatgaagcttacattttggctaacagtcctttaatttcttatctccaaattttaagaaaattaagtcttcatgatttattcatcatacataacattttgttcatttgactttcatggtgatttttgattatagtaaaatccaacattcctatagaaatataattcaattaacatgtgttctaaaatattctaccatctacattattgagtaaacaaagataaatacattttatttaatccagtgtgtcgaaagagtaaaaaaagataaaattaatttattttatttaatccaaaaatatgatttttacatctgttcaatatgagaactataggtaggatgttggacatattttttaaattaacgattccagtgtgaagtgtattttatacttgcaacacagcttagtttgaactagctacatttcaaatgcttgatagtaacagtgacctatgactaccatattggacaccgtgggaatcaattccaaaataaaaagtataaattacatgatctttaagtgttctttcagcttttctttcacagttttctgttgagtgatttctatacctctaaactacgtgttccaagaaacaagtagaaagtgaatatatccttgaaatatttagcagtaaataaaaataagtaatttattatttcttatcattgactgttttgggaaggaattcactaagtagaccctttatcatattatcatcaaggaatactacttatttcttggttactactatctctttgatacatttaaatacattattaagcttttattatgacccgtgagtcctatttaatttttaagcaatgcatttgtagaattcctctggttttactagagttaaccttttattttctgctaatgacttaaaactcctcttagaaatgtatttaaatgctcacgtgtacaaaagggaaattgactaataactgattaagttatgcacaatattttatgtgtaagctttatttttataaatcgtgtttatggtcttcctaaataagcagttaaggaaatacatataaatgttagtaaactatcaattatactgatactatacatgaattagacaaagttaaaaaatttagaaaatttttcaacctggcatataacatgtgtccaccttgaatataacaaatccagagacacaagaaaaagccaaatacagagaatatgattctttggttatgagcatgaagcggtgctgcagtgtttggggaaaagggccacaatcatgtctgctggggattcaccctgtaattatatcaccatccagctgaatgcaaacctgcagggaaaatggttaaggtagtcttgtcaaatgttgtgcttgcaatctgtttctctgcatgctgacaagaaggcaataaagtcaaagacaactacacaactaatgtatactggagaagaaaactaggctcagttgcaatgtactgtaacaattttgaagttatatagtaccactaacttgagtgacctagaaaaattgaagttcaagatggtagcattatataaaccagtgaatcgtgtcattaccgtatggatacaaaagtggattatttattttaaatattctattcagttatctgcgtatatctatcctgcatatatccatatttcacagactgcaagaatacatataataaaagaaggcaaaaaaaagcttttgaaaaaagaaaatatactgggaaatgtaattttaattctgtaaattgtaaaatactaatcttggtgatttgggggaaggagagctgatggaaatgaccaacaaaagttgaccctttgctaaataatgaaattgtatcctctgcctagcttacttgatctcttttagtcagcacagctgtgtgctattaatattttctcttataaggaccctgagcctgaaaaaaattaagttgcacagtacacaatcattaaactaaaaagctagatctatctaactgcaaagctcacattgtttacaagttacttgaaagtctagaaaattcagttctgagtcttgccagttatgtccccaaacaggaatttgacccattggactcccttgtgaatcactagattaaccaatgtgcttattagagcccttcagaagggccaagacatttcttcctgtgaaataaatatggaaacaagatattaaatatcttctgtgtttcagaggaaaagtcatgctcagatattaaatacatacaaaaatgtagcaatgaaataattggttgcaggtgctgttggtgactcacccatatctcatcaacacacatcactcttgtgcattccaactggaagcacctgagactctttctgaaggcttttctggccaaggtgtctggctcaactgaagggcaaatggaaatgcatgcattcatatcacctgggagcagccctgaatcaatgactggcagctttgtggatcaatatcctagttcctttgttccttggtggggagaaacctgagacacagtatacattgcttctcaaagttgagcagtggtgttgggttccaaagatcttcatgtgctacggtggtagtctgctcaacatctcaacatcgtactgattccttgtccccttgggatcataccagtgcttcccttggaacatctctccccacataatattaatactcacgtatttgctcaagttcttctgggagaatttaatgtaatctgtaattccagtgctggaagttagaattttagtatgacaatggtaatcctttaaactttcacaaaacaccactgctccatttgtttttttcctattgcagtaaaatatagaaagagaatctagaaggaagagcacaaagtctataaaaataagaggggatgagagagaaacaggaaagagaaatgaaacgggagttgagaaaaggagggaatcacaactcgggagcagaaatgagtaaaatgtgagcaaagcaaaggatcacggtgaggggaacattttccagaggattcttttgaaacgacttgctggaaatttggaaaatgagcaacagtaatgtcaaatactatagctctttgaaagagagagatgaatgaataaataaaaaatatttatttgttcaggcggaagaatctggacaaataagtgaaatttgcagtgaggatgatgattgttcaatatgaggatggcctttctaaccgaaaccatcttctagggtaaagctacctcttcgtcacttaaccccagcttcaatgaagttgttcagatggttggtgtttctgagatttggtttattactcattatccaataaacctgtgaatttatagtcaaaaaaaagctgatggtgggcagacattgcttaatgatcagctagtatctgcatacctgcttaataccctgtaacatgattttgtctgaaaacacctagtttcccagactagcgtctcttctaatgtcaactttcccactgcactgccaacgcaggcccattcattcaaaatttaagagacatttgtagcattccttttctgtatcgggtttgctcaatctcactgagaggagtcgagatctctacacaattatctcttataatgaaacatgcattgatgagattagatacagtttattccatagaaaaaaaacctaaagttgctgtaaaatgtgtttagttattgtgaatcctttctagttggttataattacgtgattggatgtaatagaaaaagtgtgtattccaggaaacctggtttttttgtttgtttgtttgttttgagacggagtctcgctctgtcgcccaggctggagtgcagtggcgcgatctccgctcgctgcaagttctgcctcccgggttcacgccattctcctgcctcagcctcccgagtagctgggatggaaacctgtatttttgtcttatcttgaactatacctaacaggttaaccttggaaagtcatctagctctggaggaccaaagtttctttgtctataacatgagcttgaacaaaatctccaaattccactacctttggttcatgaatagactacaaagatgtgattcaaatgtgttggaactgaatgcaaaaatttgtgagcctgtgcatttttctgcgagagggaacatagttttaatcaaattctcagactgttatttgaaacattttaagaaatgctgaattgtactaccttgaagatcttactttttctgaaatactttgattcataattctatgactcattacctctttggcaatttcgaatagccatttctaggaaataaacttcttccttaaataaatatcaaagttacactgatcttaaaataatggtttatctagccatgaagtatttcacatctaaaagaaccgtttacgtttttggccaattaaaattgatacatcaaatgttagaaaaaactgaaactgtgggctgaattacacaataaaatttcaagaaatgtagaattttgaaacagtaatagtgactaaagtgaaacaaaatatttttttaaaatatctcataaaagtcaagtctgaaacgtaaaatttctcaggtcctgcataatgtaaaacggcttaataaaagcagcaaatataaaatgactatgataaaatactcaaaaaatggatgttgtcttttgtgagtgtactgcctcaattcatatgtatatgcctgatttaaaataatatatatttggattttattggtgtgatggttttatttggtttgcttttcttgtataatccttagggttaattttttaaaaaaagtaaagaaaaataaagaaaattggagtaataaaaaccctttaggaagtagtttgttagatattcatcattccttgaatcttcaaattcactgctcagcgtggggtagacatcctgcctcactgaacgttcaattactttatgggctacagctcagaaggcgaatcacctttttcataagctgcttgttgagagaagcttgaaaaggatgatattgtgtggaggttcaatacctttgaatctcatagtaaaattacaaaattattgttgatttacataagcatgttatttatctcaaactactcaccagttaagttgagactcattaattgtacattttagggtattatttcatgagattaatgaaattagcgattacaatacgttttatttttaggatgctttcaaattatttacaacctatctgtattacactacaatcatgtctaagagaggaatattgccataattttggggaagactgttcctatgatgatgaatgagtgtatttttcaaaatccaaaggacaattgactgatttctaaaattcaatcctagggtaacaaagaaactctgcacttataagcattgcatatttgttttaaattataagagcagaatgttagttcatttaatgagtatatatatttgactttaatcttgttttgttgaaaataatgcataaacgttaatggaaaataactgaaaccaaagaagggaaaggtagttgtgtcaaacaccatataaaaagataaatatggctgggcatggtggctcacgcctgtaatcccagcactttgggaggccgagacaggcggataacctgaggtcaggagttcaagaccagcctggccaacatggtgaaaccctgtccctactaaagatacaaaaattagccgggcgtggtggtgggggcctataatcccagctactcgggaggctgaggtaggagaatcgcttgaacccaggagggaggcagaggttgcagtgagccaagattgtgacattgcactccagcctggaggacaagagtgagacttcatctcaaaaaaaaaaaaaagtgaaatttctaaaataataaaaaagtcactttaaaaaatcttaaaatatgaaaatgacatgaaatttatagaagtgttgttcatttttatatgtaagcagagaatagtgtgtaatatttaaattctttccctaattttttaatattctttacaacatttgttaaatataaggtatattaaacccaaatggtgaattaaactcaaactcaagacactacatgaagaaaaatattccatcttcattatcactatccattttctgtaacattcagagtagttgaaaacttactttactaaagagaggtgggagagggttaaaatttgttattaatattaactgcctatatgagttttgtgttcctttaactttgttgaatttaattattcaagtaaaagtagtctattcaatcattaattgtatgcaattctattatgttataaactagagtatttgaattcctaattcttccctctgaaaatagtaatataagaattttatatgacataatttgataaggatctgtgactataataaattataaatccaggtgtctattcagttttagacttctgacctcaagcgtgtgaaacaagtgggtatgtaaggagagatcacatcattcacggcatttgcattttatatgtcctcaaaagttttcttctaaaactgactgttttgctaattttgtagtaattttattctagatttgttcagttttgataggttttctccattcactgccaacatccatttgagtattcgaatactatgtagatgtatttttagtaaaatatgtttcatttttataattggatccacacagtgctggagaattctacgtgttaaagatgtataaaaataaaacttatttaaaaattaaatgtaaacttacgttctcacaacagagtaactagtatttcaaaaatgttcatatagccttgcaaatagttgaaaatatatatttagaatttagacatttttattcatcttaacagttctgttcactgggatgcttttccacaatactcttaagtcattgttgtaactgaaaatgatcaagagtaatcatttagcgaagactttgagttgtctccataaaagaacttaagcagggagaatgatactccctgcatttttcctgcagatgacattgcatataaatgacacctgccgaatcatgccaagacatacaatctcatcgtgaccatggaagctcatggctaacggtgctgcctgctagttgatccaaaaagttgggttcctgccagagatgtagagcaatgcagtacattgataattactagctagctctttcacctctcttcccataaatgttaatgatagccttgaaatcccaaagcatttctttaacatttctattctttttgtgcaaaattgtgactgagggaggttaatcagtattgccaaggagactaatggtggaagtttctgctatgactcttatctccagttcataaaatacagagaatgttttttagatatataacacctttagccttttttaagtccttaaagttggatcccttatatcccacatgtattatgcaacatttagctgtgaatatgcaggagatattagacttgacataacagaaaacaatgtttgatgatccagtgagagtacatatgagagaattttgaaaatggtaggactgttcattattattaatgttgttgctatgtgtgctcaccccctccaagtcctttctgcttttttactttctttcttgtaattaaattgaataattttaaaaatattttgaaaccaagtaattctaaatatcatgtggcaagagaagaggaaataaagtgaccttttaacaattgggaattataaaatttgtaatatttatcttctccattaattatatcatcttatggttttctttcttatagagctttcctcatttagctacattgaaccgggacatatccatatatcgatctcaactttagccgaattttcttagcaaatgccgagctagagcgaaatttaagaaggcatagtgataaggaaccgtatccctacccccattttgttatatgctaacataaggtcttgctgcctcatttttaaataaacatttttattttagaatacatttagatttacagaaaagttggggagagaatatagagttcacattcccgttatcaccgacaaccagtttcccctattaactttttaccttaatgtgctaacatttgtcataattagtgagccaatatgcatatattaagcctaatgttcattgagattttcttaggttttacctttagtccttggctttcttttttggttccagaatccaatctagctcaccatattacatttggtcattatgcctccttaggattctcttggctatgactgtttctcagactttacttacttataatgactttgacagttttgaggagtactagtcaggtattttgcagaatgttcatcaactgggattgacctaatgtttttctcatgattagactggcattataggttttagagaagaagatcacagatgtgtcattctcaccacattctatctaggatacacactagcaacacgacttgtcactgttgatgttgatcttgattacctggctaaagtaggatttgttagttttctctactgcagtgcagactctttccatactgtagtattgggaaggaagtccctatgtgcagttcacatgtaaggctattatgtctgcctctttgagggcacagtgttgacataaattattctacatgggccatgtataaaattttattattcctccccatttattcaatcatttacattattatggacacatgaaatttgattttatcataatttggattatattctaatagtaccttgtttctctttttaatcaaataatttcagctctggccactggaaactctttcagttgccctgtgtcctttgacacacctgcatcactacagagtttttgaaaagcatttctttattttctggcattacaacttgcatcactgttatgtatgtgtatatatatatatacacacacgtatatatatatacacacacgtatatatatacacatatatacatatatatacacacatatacacgtgtgtgtgtatatatatatgtgtgtgtatatctatctatctatctatctatctatctatctatctatatatatatatgttttagcttgtatattttttgctccagtcttagaatcaaccttctaaggaatcctggtttttgttgttgttgggtaatggtacttaccagaaaccagtatctggatgctatgtatgctcattgatagtggaatataattgtgcaaggggatatatgtgtttctactaagccatgtatatatgcatatctataaatttctatatctgtgtcttcatatctgtttgtatgtatattcatctgtatgtatatttaacttaatgtgtgttcatattgatgtatccaactataatcaactataatcaattaccatgtcaatcattctaaccttctccccttgctatttgtaacttcccaccccaatagtaataaacgtggatcccaggctgggcgcagtggctcatgcctgtaatcctagcactttgggaggccgaggcaggcggatcacctgaggtcaggagttcgagaccagcctgaccaatatggtgaaaccctgtctctactaaaattacaaaaattagccgggcatggtggcctgtacctgtagtcccagctactcaggaggctgagacaggagaattgcttgaactcggccagcggaggttgcagtgagctgagatcatgccattgcactctagcctggacaacagagcgagactccatctcaaaaaaaaaaaagaaaaaagaaaaaagaaaaaaaaaaacctgtatcctaccattgccatcaatttaattacttgttaaattcttgttatcatgtatgggagtttcagaattgttagtggtagccccctggagaataactttgtcaaacagagaacaggatttatgtgcaatgactctagtcttgcaaactctatttccaaagttgcctaggttagcatcacccctctcccctgccaccacataagtgaggttttgttacattttcatatggttagattatttttttcacattctgccttctgacatgtgatcctgacttcctgcatacgttttaaagcgtttttcatatattaaggttttctcttctgtatagttctatgggttttgacaattgcataatatatattcaccattatggtatcatatagaatagttccaatgccctaaaaaaatgccctgtgctttgcccactcaactctctctacagaaaaccctgcaactaataggtgtaccctctctgtagttttgtctgttccagaatgtcatataaatataatgataaaatacttaactttcacagataggcttctttcacttagtaatatgtatttaacattcattcttgtctttgcatggcttttagcttatatttttaagttcattatatagttgtatcacagtttatccattcacctactgacattttggttgtttccagtttttgcaaattacaaatgaagctgttattaatgttcatgggctgtgtgtgtgtacataagttttcaattcagttgagtaaatacctagcattttaattgtgggtcttatagtgagaccatatttaactttttaagaaactgctaaattgtcttgcaaggtggttgtgggaatgcaaaacggcacagctactttataagacaaattgaatgtaagttcttgttactttgtgttctcactgagaataatattcttagttttgtggatgttcgccattctagtagttccgtagtgccaccacatagttgttttaatgtgctctaacttaatggcaaatatgttgtgtattgttaatatatgtttacttgtcatctctatatcatttttgataccgtgtctttttgattatttaataaatagcccaatttagtaattgggctattttcttaaggctgggtttcaagagttctttatttaatttggatatatgtaccttatagaatatgtcttgcaaatattttctcccaggccatgctttgtctgttaattcttttaagtgtcttttgaagagcaaatattttaaactttaataacgtccaagatcaattttttatggataaaggcttgtgtgtacctaaaaacttttctctaaatccaagagaaaatccattttattctaagtatagttttttaaattttacatttagaactatgatccattttgagttaattcttgcacaagacatatagttggtgtctgttatttttattttaatatgtgaatgctcagcattattactttttttatcaacatttcaacaaagcagaaagattatcctctcttcatttcaaatgcctttgttaaatattaattttgtttgtgtgggtttattttactggttttctactctcttccattttctattcctctgccaatccctcatagttttgatgactgtagctttatttgtcttggaatacagtagcatgagtccttcagtttgttcttttttcagtattgtagctatttcatgtctctttccttgccatataagttttagacatggtttgttaatatcagtaagatagcttgctgagagtttgattgggattgtgttgaatctataggtcagtgtagaaagaattgacatttagaagtattgagtcttccaagtcataaacctggaagatatttccaacaccctcttctttttaccctgagaaataacaaaatagtgatatttttaacatgttttcctcattaaatatgtcttataaattatgtaggtccagaagacaaaaaagaaaaataatctccatccaacaaacagcatagattaagattaaatagatatacaagtatctgggtcttgccaattaggttttcaagtgcattcatacaagaaatttactggaacacattttgatatatattaattataaggctgctttaatattatagatggcatagaaattaaaattcattgtgcagaagattgacacatatggtcagagaggaaaggagactcagggagcagcacattattaattagaagatgggggaggataaacataagactctctggagaaaaaattaaggacatgagacaagaaataacctgaatctgttttgaagggatagagatgcataaaaggactggggtattagaaaagactactttgaaaaaaatgagagttttgagttatgagaccagaaatgaatggcttagaaaggcatcctcttctacccacaaattatacttgaaaaataataatcaaaatatcatatgttttaaaaataaaacacaggcttattatttgaatctcaaaatttattttcaaattaacaaactagtatttgtctgtgagttacaaattctatacatttgaccaagttccatttacagagtgaaggcagattttcttcttaataaaagacgcattttaagaattctgaaatgtaattgaaagaaaagactggcaaagacatatgaggacacaaatattccaaacaattatttggttgttaacatgccaacaaaaggttggttttcaaaagaccatgtttttttaatttcagaaaaatacggtttcagtaattctcataagtaattcagcgatgagctatcagctaccggtaatgaattctcctacaaaggaataatttattcccagtgtactcacacaagctgggatgttaccaggaacttgaagctgtaaaagaaccctatcttattagctacaatgcctcactcataatacatacctcatgagttacatattaaatgatcagaggttatttatcttcatacactagtttggaaatggatgaatcatttctcatttcttctgaaagacatacattgtgcttttgctcaaatttcaatttcagagcttcaaacttgtgatacttatctaaatgaaggattagactcacatttgcacacacacaaagcacaaaacaagtgaactaccatatctaaaggcaatagatattacaatgaaacacattaacaataatgtttacttttctaaaaatgttcagttatatattaaagcaaaatggtatttcaccctaattctatgcaaatgtttttgttaaggcattcagttgcttaattaatggtattgaattttaaaaaatctattggtttgcaaatcaggttcttacgcttgtatctatcattctgttctgagagggttgatttatgggtacctataaataaaacagaaatctaaaaaatttagtgagtggagcccagcatgcttcaaaatggaagttgaaacaccaccgtatactatgatcaaatatgttgacttagagttactaattttactttaggcttgataagaaaggattgtgtgtaatctgaatacttactggtagtgagcatatgattgtgtgcctgtaaatacagaatatcattgataatggaaactcaatgtatccaatgcttagttatttacacaaaatacatcaactcatcatgaattaaagactagatcaaagtcataaaaagtaaaaagatacaaaagaaaaatgcatttttcttagataatatcttcattaaaataatagttaaaaattagtggggcttaaatttattgctgtgtattggggcttgtggtgttctttatgtgtacttcaccccatttaacctgaataacaacatgctagttataacctcatagctttaaaatggaggccattctgaaggcctaacttcattgggtcatctctaatataacattgcttcttttgtaattccagcctcatttttctttatttctgtattagcccattttcacatttctgataaagacatacccaagactgggaagaaaaagaggtttaatggatttacagttccagatggctggggaggcctcacaatcatgacagaaggccaggaggagcaagtcacatcttacatggatggcagcaggcaaagggagagcttgtacagggaaactcccatgttttaaaccatcagatcttgtgagactcattcactctcatgagaacagtacaggagagaccagccccataattcagtcacctcccaccatcttccttccacgacatgtgagaattgtgggagttaaaattcaagatgagatttgggtggggacacagccaaaccatatgactttcctaaactgactgcttgatatttgtatgcattatgtatgaaaatacgtattacttcatgtaaaatgaaagctgtttgattatgctaaagaaaacaattttgtactgtatctagaaaagaaaatgtttaattggtcagcattaaaagaatgagtaaaatcccaaatcaaagtttagaatatactaaatgtaataattacctccttatatcattctcttgtaatgtctagttcttcaaaaagctttataggaaatggacgtaggtactattgagagtagaattttaattttaactcagggaacttaaaacttttatgtaatgaccttcacagtatacattttgcaacctgttattttagggcattatcaatttctcagatcaaagtttgaattacagttataatattctgttcaccaacttccttatttaggtacaaaaggtttaaaagatctaaaatataaatgcatgaaaatttagaaaactgtttttctcctcaaggaagcaccaaaatggaaaaaataatgacactggttactactttcttcttttatataactcagttggttttaagtttcagcttcaattcctcagttttgttctatttggtttgggaaagtggtacattatgtatatacaaatttatgtgtgtttgccaatgagtgtgtggtcacgtatatctttgtgatttattatagtataattttacccagtttttccaaagatatatttaatagtactaaatagaaaatctatgatatccatacttgttcatatgggatatctttttccacttcctttaagcaggaagtaatttcttagactgaaatgagctttagaccattcctatcacctcagcatgcagacaatattggtccctcaagggaagataagttgctgataaatctgtagtataacattagagaactcaagagccacagtatcagattgtcccaacaaaattttagagcaccttgtttatcatatgcggaatctatgaaagctaatctaagagtagatagtagaatagtggttaccaggagctagagtagttgatcaaatgatataatattttaattaaatagagatgtttaagagatctattatacaccatggtgactatagttaacaatacattattgacaaatgctgagagtggatgtaaagtattgtcaatacaaaaataattatgtcaggtaatgcatatgttaaatagctgaatttagtcattcagaatgtttatatacttcaaaatataatgtggcatatagtaaatacatacaattttatgtcaattttaaaaaataaaaaaatgaaaaaagaaaactatgaacccttgagcactttagagagagtagaactttcctgttacattcataggatagtatttagagactgtacttcgatcaagtatatgagcacagaaggacctagtattaagagccccggagcaaaatagtcatctcacagaaactagatcaaagtgttaagaatcatttaagcagctacaaatacttcctgaaccatattttgcccacattacttgacggttattctttatgaattaatatggaaacttaaataacctactgcacactctatataacttattgtaaagaagtaagcatgtaaagtcatacgggctcaaactttcacgtacctgtgagatagtgttccactttatctaccaaaataatctttatttatgataatggttgatttcccttatcttttaggtcacaatacatgcttttgactaatgttatctgcttccatactcaacataattcagaaatgttcttcctaaaaaataacatgctgaatgtcatatgctccaaattgtgtgtaactttaaacaagttggcagagggctgcctcctacaagtctgtcccctggcagttacccctctcactcctcatcagccacacacatagaattacatactatttagaaacgggctaatgtaggcatgagaaatgtaatgtctttgtcataatatttgtcactacttttaataataacccttctaaaacttgtgcaggaagttaatacttttctttaaataaggtttattaaaatccattaaaaatgctataactttatcaaaaatatatcattttttaaaaatgtagaacagagcagttgaatagtttctctaggtgtcaaatttcaacaatatttgttattgccactatataaaatcttctaaataacagaatattttataccaaggaattatggcatatgatttcctgaaaatgaaattttccttgatgatttaacatttccaacaaccctgataatcatcatcaaatatatatttgttaggttattactagttactagaactataaactaggccgtatatttaaaaaacaattttcttcttgcagattatatgttacatggaaaatcccaaaactttatggcacactgtgcatgagtaataacaacaagaagaaactggaggcttatgttttgagactggttcacacagaaactgcaaataatagttaacatagggaatacggtgatgatgagttcattagggagaaataaatattgtattgcattagccttcatattttaggatggggtatacactggatagttaagaaattttattttataaaataaatttgaccatataatgcatagaatatggtgttcttttttttttaagttctggggtacatgtgcagaatgtgcagctttgttacctaggtggtttgctgcacctatcaacccgtcatctaggttttaagccctgtgtgcattaggtatttgtcctaatgctctccctcccctagcccctcattcctagacaggccccagcatatgatgttcccctacctgtgtccatgtgttctcattgttcaactcccactaatgagtgagaacatgtggtgtttggttttctgttcctgtgttagttttctgagaatgatggcttccagcttcatccatgtccctgcaaaggacatgaactcatccttttttacggctgcatagtattccatggtgcatatgtgccaccttttctttatccagtctatcattgatgggaatttgggttggttccaagtctttgctattgcaaatagcgctgtgataaacatgtgtgtgcatgtgtctttatagtagaatgatttataatcctttgggtatatacccagttatgatgctggaacaaatggtatttctggttttagattttgaggaatcaccacactgtcttccacaatggttgaactgatttacacccccactaacatggtaaaagcgttcctgtttctccacagcctcaacaacatctgttttttcctgactttttaataattgccattctgactggcatgagatcgtatctcactgtggtattaattttcatttctctaatgaccagtgatgatgagcaaaaatcacaagcattcccatgtaccaacaatagacaagcagagagccaaatcatgagtgatcacaattgctacaaagagaataaaatacctaggaatacaacttaaaagggatgtgaaagacctcttcaaggagtattacaaaccactgctcaaggaaataagagagaacacaaacaaatggaaaaaaaatccatgctcatagataggaagaatcaatattgtgaaaatggccatactgcccaaagtaatttacaggttcaatgttattcccatcaagctaccattgacttttttcacagaattagaaaaaaaactactttaaatttcatatggacaaaaaaagagcccatgtacccaagacaatcctaagcaaaaagaacaaagctggaggcatcatgctacctgacttcaaactacactacaaggctacagcaaccaatacagcatggtactggtaccaaaacagaaatatagaccaatggaacaggactgtgttcttaaaatatgaatttttcgactgcatttgaaaggaaaacaaatatttgaaatggtcaattgaaatcgaccacattgaaataatttaaagagggtgaaattaatatattcaaaaataaattctgccagaatcatagatgtttgggacccatttcatgtctgggcacctgttattatgggcatgcctcctacactgaactaaaatttacatccctgaaactccaaggctttcggttctgtcccaaggtaaatctacatcctcttccatgtgagagccttctgagtatttgatgaataccagtaagacaaatgaccccaggttcttcacttgttctttacaagagaagttttctggtctcttctgaattctggttagtcttctctaggttgcaaagatctttcgtaaagcaagagttctgaaaagatcaaattttatgtgtgataaaatggcacgctattggaccatactgagtctgctgtttaattttcaaccaattcttaaattatttccacagtgaactacatactggctggtatttttttaagaatctctcacttacatacaaactcactttaccaatctccaagttttaatgtcagtcaatactctcttttgttgttgttctcccaaatacaaatgttcaaaatcttactaatgtaactttcttcagtgcctgctcaaaggctcagaaatcactttttaaaatttactttttaagataaaaattgattaaaagtatatcatttactccaaccattcatatgatgtaattactatgtgttagagactttattagcaagagcatattctgcaaacaaggtagtctgggctttggtctcacaggagtgatgatggacatgtcactatgcgtctgtatgctttagtttcatcaaatgaaaatttagagagtttggttgtgtgaggaggaatgggtttgactgaatcaggaaaccttagtggattcttagtgattgtatttttcattggtaaattcccatgacctattcccaaagctattccagggattttaggatttgatataaaaaactacaattttcatttcatgtgaatatatttttgttattttacagtaagaaaatgttcatgttaaaactatatgagcaacataggacagcaaatgaatttttagtactaaatataaaatgcctcaaatatactggcatccaataataagattttaaaatatcagattttaaaatcgatttagacttaagtaacattggccatgtgttcaaaagatgggattttaatatacagactattgagatctaatacactatgaatatccaatgaatattttcaagttaattattcaaaaatcaacattttctgaacaaaaaaatgaaaaagataagttcttaaccataacgtagagtaacatttacaatccaaaaccttttgatctgaaatatcaaagattataaaaaatattagcctatatttgtagaggacataaactttttaaatataatttaagaatataaatttataaacaatcatgtagtcataaggaatttaaaattataatctatgaatactcatcaaaaatcacattagaatttataaagatcctgaatttatagtaaaagatttattgcttccatgaattagcaatttggctgagctaatttgtaaatgatgtggtcgcttgaaagactatacacaaaagaaaattggtaagcaaaaaaaaaaatacaaaatatcggaagaattactgaattgagagaatgaatgctctccacaatcaatgtcattaaaaaagcaactttctgaaataaaagagaactgtctacttttttctttgtcccttttttagtaagcagtttgcctctggtttaacaatatgaacatacttcctttcccagctggaggcatccgatcctgggaatattgatgtatgtacaccccgtagattatacttttcagactagatggatttctaaattcaagatctaccaaatacttccacaattctaattaaaataagaagtttgggagtcagaaaccttttgccctagaggcttgccccaccatgtattaattttcaccattattccatttaactggggttactcatttttatttcctaaaaaattctatatctggaaagaggtaccattctacagcatttctggcaaatcataaattaacctacagtaaatgacattaaggagatagctttgttctgtaaatggataggataccatatggctttgatgttagtgtgaagttaatcacaagctccataacaggccatgacatcatttcataataaattgcatgaacaaatgctgccgttatctgaacagcatgtgaattttggtacctataatctttagggaaaaatgaatataaaatattgagttaaaaaatagatataaggatggtaccatagcgtctccactaaaaatacaaaaaactagccgggcatgatggtgggcgcctgtagtcccagctacctcgggaggctgaggcaggagaatggcgtgaacccgggagacggagtctgcagtgagcttagatcgtgccactgcactccagcctgggcaacagagcgagactgcatctagagaaaaaaaaaaaaaaaaaaaaaaaacagaaacgtctaagttgcaggaagtcagtaggtgtacttttggagtcatcttaaaaagagacgatagacatttcttccatttctccctttgctgccatctggcaggcagcctacaatgtgattgatccagtaggaagagtaccctatgggccaatctatgagccctgctagctaccctggaaagaggctgaggtgccttttttcaagaccccaacactagctccacaccacccaaccacatcgtttaaatttcagttattttctggtacacactggtacacatttgccaattatgtacaaagactgtcaatgaaatcagctgttcactatgagattacagtgtggctattcttttgtaacaaagtacttgattatctagagtattttacttcaaaatatttctgaaaaccatacttccctgtgccgaatcctcagtcagaagagagctgacaatcaatacagaagtaacatattgttggaaagaataattagaacattaatgaaaactgatctcattcatttttcttaaaaatggaggaaataatgttttctgatttctctccatcattccaagtgcaaggtaccacgtaatttatatgtaattcaaacatcaatagagagattttttttatattgattgctcccactttagtagtgctctataaacaaataaagaaattaactgattttacccctgatcagatgatctttctttggagatgtgacatttaatctgattattcatgaatatgttaatgagagagttatcacatgccagtcattagacactgaatattaaaatgcaaccagtcatgcagtgttgatgacaagcttccttttccaatttgcaaggaaagaataagcaaacaagatgagtctaatctctgggttttgttactttttgtaaaatcttcagtggcacttatatgtgtcaagaaaaaaataatttcttaaaatcgcaaactcagggactgcaatgttttttgtcactcattccaattaaaccaatggcacttaaatttaacaggaatgagactttaataattaatagagtacagttgtgtgtttctaatatgcaagcaattccaagttgataaacagctttggattaccaaagtttactggtaaagctactgttaggaacttaaactagtcatgtattttctgtaagaaattactttgcaaagaatggtaggaaatcagagatttaatctcactccaccaagaccctctgagggcaaagaaaatgtgcgtccaggaataagcacaaggcctcaaacatagcacacacaaaataaagattagatgaaggaagaaaggaatgaaaaatacctggatgtgctatactagtagtgtataaaaatctaatcattatttaaactttgtttctatgtgaaaacttaatggaagattccatattggctctaagaaacacagcagctctcttcctacctgtctgccttagtaaccagcagtgagtgacacttttctcttacaaccagccagtggcctcaggatgctatgctagtaacaggagagcatgaaactcctgaagtgtcaggggctgtcatggctttgtgtggacattcttaggtgaggtacagcgatgacacatcgtagagaagaggaggtggggtagtcaatcgcctcagacactaaaccataaaacatctctgaaagtgtaaagcaaagaagaaaattgtattcatcagaattcttcttaaaagagaatactgggtgtattacaaggacctcttggttaagctgcatggggtagactgtaagaggcttttgtctgttccactcacagcaaagcccgtatgctccaggaattgttagtaattgctgtgtttgtttggtgaagtggatgatataagaagcagggagtgctgccttccggagtcctccttttctgcctttgttctcatccaggtgccaggactcatctctaaaaaaaaaaacagttgagaaaatatttagagtatcagtttgaaggggtttcaaattactctgctaagagcaccgaaatgcctgtctctagccaggagtcaataaatggggcaggaaaaaggagggactgttccagtggcaagtgaatggagccgcctaaagtattgcttgctcactttagcaaactgccttatagtattaaacagtacattatgagactgttttcaccaaacatcttgaacaacagacaggtgcatttttcctgttattaaaatgtgggtcataaaggcaaagctacagagacggaaaacagatcagtgaattccaggacacaaaagtaggggagaggtggactacagcggtgcccacaggaattctgggcagggcaggggggcggggggtgatgggattgtgctttatcttgaatgtgctggtgattaccaaacatatgcatttgtcaaaacttatggaactgtatgctaatcacagtgaattttatggcatgtaagttatattttaacttacgaatttttaaaaggcattatattattactctgaagattcagataaacatacacacacatatgaaattcaggaggtgttactagaaaaaaagcccagtttctccttatctaaaaaaattgccgaaatgggctatgattttttcaatatcttttccaatttttgcctcttataattctgtgtttaaataactaaagaaatctgaaattacttagcaactttgtactagcaatggtcattattttacaacctatgctcagatactaattaccttctcataattgtccagtatgcaactgagaaggtcaaccactaaaatcattttaatttcccttcagcttcactgattatttgtagagagcatttcgtttctaggtcaaatcgtcttaatacacacagatcactctggttgagccaaaccagattttcttcaaaagctctgacattgagaccctgctctggcatttcatttgtttgtatagaaaatgttaggcgtctctttgccaagtctaagctgtgattccaaaatcccctcataaccttgcttttcaactgtattccaaacatatataaaactgaaattgaccctacagtcattgccagaggcatacatagagagaaatgtacaatcacagtgtcattggacacacgcatataaattgcgtatctctaaacttcgcaaatctaatatggtattcacaatttgggcaataatgtcagcaacaaatttaattaaataaaaaccttgagagaaatagtggtttatttctgaaaaccaaatattgaaattttgctgagtggcttactttaaatgatcagaggaatgcttcataaattcttgcagtagcatcgtaagactttatgaccatagattctctgatacatttattgggacaccttgtaaaatagtgaagttgcagaaacacaaaggcatagtttttaatttcacatttttcaatacatattacacatgaaaactaaagttttaattaaacaaaggaagtcttaagtttgcattttatacattgattgacaagatatctcttaacataacatgcatagccaagttccttgtgtcacttgctttgcttttttcattcttccttaatttttactaggattttattttctatttctttttcaacaggaagctctgaagccaccacctagttcacttcaatagttatgtgcttttctacgtttcaccacaattttctcagtagttcagacgtatcactcttgctcgatattgattgagttatataatcactattagcaaatgctctttgatttgatcctttctaatgtgtattttctcagggacaggaccagttttgaagttgaacacacactggtgtgtaatgtgcatgtacagagtgcctctgaactatgcagagtaggaattgattcctaaaccccacataaatgtaactcagactggtttagaaaggctattggatttgaaatggcaaaatactaagatatgggaaaaaataagataccagtttaattttaaaatcagtattaatcatgtttaccttattcttgattttttaaaggaacaaaaaccaacatatatgttatttgatttgtacaaatttgtattattctatataacatccatatatattgtccataaccatgtgatcacatagtgtgtctataaggaccttgtatctagtcatatgtgcacctgttgcagtaacccatgctgtgtaggcaggttctatgacaattcaaatcagttctagtgataaatcaaacctgttggttgcttttattgaatgttgttctatttctgtctgtaagcgtatagccaggttaagagaaactgactgaactaaaggggcgcttatgactattccctaatgatatcacatccaaaacaatgaactgacagtgacttaaattattaagcattaggagaaatccctgtatccctgcagtgttcagttccttgaggctctgacaaatgacctccagtttgttggacaaagtaggcgggatatgaaggcagctcttatacacatactttattttggctggggcaagtatcactggatatctcatttggtagcatattaaaatatgcagatcttcatggatcagacaatattattaaaacagtttaatacagtcaggtgtttcttttttttttttttttttttttctttgagatggagtctcactctgttgcccaggctggagtacagtggttcgatttcggctcactgcaagttcctcctcccgggttcacgccattctcctgcctcagcctcccgagtagctgggactacaggcacccgccaccacacctggctaatttttttgtatttttagtagagacggggtttcaccgtgttagccaggatggtcttgatctcctgacctcgtgatccacccgcctcggcctcccaaagtgttgggattacaggcttgagccaccgcgcccggccaggtgtttcttaacgatgggaatgttgtgagaaatgtgattctaggtgattttgtcattgtacaaaaatcacagagtgtaattccaaaacctagatggcggatcctactatacacctaaggctgtatggtataacctatggttccaaggctacaaacctatataacatacagctgtactaatgctgtaggcaattgtaacactatggtaagtatttgtgtgtcaaaacttatctaaaatagaaaaggtacagtaaaaatatggtaggattatcttatgaaaccaccattgcatatgtgaagcatagttgactgaaacatcattaggcagcgtaggctgtatgcctcaggtgccaattatgtgattccatctgatagcaactatatgaatattatatatttgagactaaaaggctaacataccaatttattttgtatgcagcttttaaaattcatgctatttttacttgtaaaagttctgttcactactttaaaagctgaagcacattaccggaaaaagcatgatgtgacatcgttctctactataaagaaaacacctgataaccaataactttcaaggaacacacaccccatgccacatcctatgcattctaaccattttacaagcattatctcatctcatggaatccccacaagtatcatgtaagatagattctctgattattcccattttatgggggaggaaaccgtacttcagaaggttaaataaaacttgcttgagtgtaaaatatattttcttacctctcactaccatttactatgatacatttactaaggatttattaccctctgaacaggagccttgtgatctcacatttcccaacccctcctccagggagtggagttgatctgagtattcagaagtaaaaatgacagtagttagcaattgctgagaattgtccatgtgccaggcactgtggtcaacacttacaggtattatctcatataataatcagaatctatcaaagacataggtcaattattatcacagttttagtagacaaggacactgaaacttataaaggttaaaagtctttgtccacatcacagctaagaagtggcagagtccgaagaagagggaaggcagtctgactgcatggcctgttctagtaactattatgaaatagccaacggcacccaagacttagtagcttttgaagcttcaccattgaggatgtgcatttttaaagatggggtcagagtataaggaagtcttcctggtcctccttaagttccacggcagggtgcctgcctgtgtactctacctacctgttctaattctggggattatcaggagaagaaacaagaaagctataaaagccttagcttctcatgaaatatcttagcaaaacatttttatgtgaaaaatgtatgccaccttttatgtttatggccttgttttattattttcttcttttggaatatttctttctggagtttacaaaggaattatactgaacgctgatgtgaatcccaaaggaaagatacgtttcttctctaatgttctcaaatgtcaggaaatcatttagagagtgaatgtctttggtggctggttctaatttgcactgttgtttgataatgtgcacactggagatcaattgtctgaagatctccttagggctagaaggtcatctttggtgaattagcctgatgcctcattaaagatatgtcaattctcctttttccttgcaatgtgtagagtatgctctctaagtggagtggcaaaatgtacatgaggagggaaatttagcaaattagtttaatgagaattattgtgtttatttggagacttcgatttgattgaaagaggattttactattgggcttcctttttggcgaaggttatccgtagcacctactgtaattgcttcctgtaaaagagtcagtatccatgcagttgcactaatgtgctcttgtttggtgcatttttctcttctttaatataaagcatcttgactgcgaaaattttaaactccagtgtttgaaggatgaattgatgttgattttctgcaaaggaaaataataaatagacttggagaaaggaaaaggaaacaaatctcactgttagaggtaatgtggaaagaataataaacaaatgtaaggaagacaacatctgcgaacagggtctatctattaatgcttgttagggagaaaatgcctaaaatgtgaataagtaaaagcctaacaagaaataaggtatagcagccttccaatagtttgcaattgaaaagagacaaacttgtccaggcacggtggctcgtgcctataatcccagcactttgggaggctgaggtgggcggatcacaaggtcaggagatcgaggccatcctggctaacactgtgaaaccccgtctttactaaaaatacaaaaaaattagccaggcatggtggcgggggcctgtagtcccagctacttgggaggctgaggcaggagaatggcgtgaacccagaggcggagcttgcagtgagccgagatcgcaccactgcactccagcctgaggaacagagcgagactccgtctcaaaaaaataaataaaaatacataaataaattaaaaagagacgaacttcttccagaagcagaaaatcaaatacttgggcaggtttctaataatttataagagaagaacatattttatgttaattataatgtaggccatattttataagaagtagctggacagttaattctgtttcagttctttttcctctttggatttctttgcttctaatttatttttctgtttctatgattatttctctcagcttcaatctttagctctttctactctttaatctctggttatgtggggtaatggaaggcaggtgctggtgtgacagtggcccagtatcatgacattctgatagattgtattccctttgatctctacttaagagtttcatgcaggtgtttcggaggagagagaaaaaaatgtttttcctgacatttttgtcactgcagagagaattacagttttacaactatcatagagattcagaacagatgaatatatgtctatcagtgagcatattaaaacctaatattttgtgggtttgttgttattatttgcaaacttggcacagtaattgtgaagacaaaaattgttcttcaggctttgtgagtcagattaaaaaaagttttaaaattagcactagtttgtaaatgagaacattcaagaaaagaacatgaaacaaaatatatgaccttaaattatgtataattgaagagaacttttaggttggtgaagctatacttactgttttttaaagaaaaaagcttatcataacttatttaaaagacaaattttgttttgttttgttttggttttttatttttttattttttatttttattttttaattttattattatactttaagttttagggtacatgtgcacaatgtgcaggttagttacatatgtatacatgtgccatgctggtgcactgcacccattaactcatcatttagcattaggtatatctcctaaagctatccctcccccctccccccaccccacaacagtccacagagtgtgatgttccccttcctgtgtccatgtgttctcattcttcaattcccacctatgagtgagaatatgcagtgtttggttttttgttcttgcgatagtttactgagaatgatgatttccaatttcatccatgtccctacaaaggacatgaactcatcatttcttatggctgcatggtattccatggtgtatacgtgccacattttcttcatccagtctatcattgttggacatttgggttggttccaagtctttgctattgtgaatagtgccgcaataaacatacgtgtgcatgtgtctttataacagcatgatttatagtcctttgggtatatacccagtaatgggatggctgggtcaaatggtatttctagttctagatctctgaggaattgccacactgacttccacaatggttgaactagtttgcagtcccaccaacagtgtaaaagtgttcctatttctccacatcctctccagcacctgttgtttcctgactttttaatgattgccattctaactggtgtgagatggtatctcgttgtggttttgatttgcatttctctgatggccagtgatgaagagcattgtttcatgtgttttttggctgcataaatgtcttcttttgagaagtgtctgttcatgtcctttgcccactttttgatggggttttttgtttttttcttgtaaatttgtttgagttcattgtagattctggatattagccctttgtcagatgagtaggttgggaaaattttctcccattttgtaggttgcctgttcactctgatggtagtttcttttgctgtgcagaagctctttagtttaattagatcccatttgtcaattttggcttttgttgccattgcttttggtgttttagacatgaagtccttgcccatgcctatgtcctgaatggtaatgcctaggttttcttctagggtttttatggttttaggtctaacgtttaagtcttgaatccatcttgaattaatttttgtataaggtgtaaggaagggatccagtttcagctttctacatatggctagccagttttcccagcaccatttattaaatagggaatcctttccccattgtttgtttttctcaggtttgtcaaagatcagatagttgtagatatgcagcgttatttctgagggctgtgttctgttccattgatctatatctctgttttggtaccagtaccatgctgttttggttactgtagccttgtagtatagtttgaagtcaggtagcgtgatgcctccagctttgttcttttggcttagggttgacttggcgatgcaggctctttttttggttccatatgaactttaaaatagttttttccaattctgtgaagaaagtcattggtagcttgatggggatggcattgaatctataaattaccttgggcagtatggccattttcatgatattgattcttcctacccatgagtatggaatgttcttccatttgtttgtatcctcttttatttccttgagcagtggtttgtagttctccttgaagaggtccttcacgtctcttgtaagttggattcctaggtattttattctctttgaagcaattgtgaatgggagttcactcatgatttagctctctgttggtctgttattggtgtataagaaagcttgtgatttttgtagattgattttgtatcctgagactttgctgaagttgcttatcagtttaaggagattttgggctgaaacaatggggttttctagatatacaatcatgtcgtctgcaaacagggacaattcgacttcctcttttcctaattgaataccctttatttccttctcctgcctaattgccctggccagaacactatgttgaataggagtggtgagagagggcatccctgtcttgtgcccgttttcaaagggaatgcttccagtttttgcccattcagtatgatattggctgtgggtttgtcatagacagctcttattattttgagatatgtcccatcaatacctaatttatggagagtttttagcatgaagggttgttgaattttgtcaaaggcctgttctgcatctattgagataatcatgtggtttttgtctttggttctgtttatatgctggattacatttattgatttgcgtatgttgaaccagccttgcatcccagggatgaagccctcttgatcatggtggataaggtttttgatgtgctgctggattcggtttgccagtattttattgaggatttttgcatcaatattcatcaaggatattggtctaaaattcgcaaatagacgcaataaaaaatgataaaggagatatcaccaccgatcccacagaaatacaaactaccatcagagaatactacaaacacctctacacaaataaactagaaaatctagaagaaatggataaattcctcgacacatacaccctcccaagactaaaccaggaagaagttgactctctgaatagaccaagaacaggctctgaaattgtggcaataatcagtagcttaccaaccaaaacgagtccaggaccagatggattcacagccgaattctaccagaggtacaaggaggaactggtaccattccttctgaaactattccagtcagtagaaaaagagggaatcctccctcagtcattttatgaggccagcatcatcctgataccaaagccgggcagagacacaaccaaaaaagagaattttagagcagaaatttttttaaaaagaaattcaaaaaaatcatttattaaaataggcaagtacttctaaaagcagggcttgaaggatgcactgatatgtactttgataatgtaagccccaaagatcaggacaggtgtctgtcttatttgctcttctatctcatttacaattccctgaatgaataatgaatgaatgtgtgtatcacaagaaaaaaatcatggctatggttgccattcgaaagaggcacagagttataacactagtcataggtagtgcagatagaagcaagatcattgcatgggggctggagggaacttaaataactagtagattacatataataacctcgattctcatccctcattctatgtcaggcttagagggtctgcataccccctggccacagtgccagtggagaagggtttctatcccgtcatgttctataatatgtatctacgaaaaatgagatcagggaacatccctgtgggtatgaaacaacaaaaactttttgaggaagtgaggaggtatcttgttggagatgggggtgaggggcacttggcatctaatgactgcataactgtattctttttaacagcttgactgagatatatttattcacataccatataggtgacccattgaaactgtgaaattcaatggcttttagtgtatccacagagttatatgttcttaagtcagatctgtggagtcaggtctcaactaagctacccagtgtgtgtgtgtgtgtatgtgtgtgaatttgtatatgtttatgtgggtgtttgtggttagggtggggaactcaagctgcactgacttccagatctgtctgtcttcaatagtgttggtaatatacttcaaaatgagcaatttcttttttcctgtgagctctctgaactatattttatctaaagatactgtctgaaatttcatattaagctatgggaaaagtcacatatgtcactgttacaggtgacgaattactatgttaaaacttctagtgaaaaggtttccaacattaaattcacattaatgatttatagtcttgtattcacactttacaagtgctttgccatggttaagtaagtctcacccattcttgtaaaagtgaaaacatatctgcttaaaagcctggcaaaatgaagcttagaaaaatcctccttttagaaaatcacataatgtagttcatgaacatgttcgagaagggagcttgaacatgttcattgtctgtttctgtgcttaaataccatagctttgtgaaatatatgtgaatgctcactagtttgtgtgtgtgtgcacgtgcacatgtgtatttatgtgtatataaattagaacaagccattatttttaattatttacattaaaattttcagagggttcaggtataaataaatctgtataagtagtataatatatagtaacagtaatgtataacatataagctgtaaattacataacataaatatacattataggtaaaagtatatatacacacagtagttaaatatgtgtattttaaaattataattgaggaagctaattcatccttaagtacatttccggaagttcctctgttggtggacatattctcaaattttctggcataaataatgtttcagtttctgattaaaaccattcttgttatccacactaaatagacttgcctggccagtatctaattttatggtggagtcttgagtcatcagttctacaaagatatttaacctgttcatgataatcacatgcaagagaagctggtcttctgtgacctgcagccagtgtgccagaaagaaggtgtcaagacaagagtcgcctagtgaaacagtgctggtgaatggggaaaaagagcaaaaattaaatggaatccaagccagtttgacacaggacaaattataaagaaaatcctagaacaccctggagagaaacaatgggcaatgattcttcaaccaaaaaggctctgaggcagggcacaatatcaatggtcacaagaggacagggactcccggccatatgccctatgcccttgtctcatcggaggcttgactgagggcagagtctgtagtgccaatgggtgaagggataacaagaggcaggtaaatcccaggagctgtttctacctccagagaaggaggaatccagcaatgctacagcatctcagtccaaattggctccctcgctgtttgacagcaacctttagggctccattctggactttatctcgagctcctttcctcaccccatttcctttaaagaatggccagaaaatctgagcatgatatccttctgttaagaaggagaagaaaaaaataatcttatattagtccatgatgtacactgaaagaaagaaaagttcagtatctttataagaaccttgtctgagggattatgttaaaaaaacaaataactgaaaacataatataatattcaaacttctcttgtttgtttcttggttgttactaggccattaaaaatcttataaaacattaattgtttaatcttggaacaaaatgtatttaaaaaggtttaaaattctgccttattcctcatgagcagtgataaagagaaatcactgggaagcaacaagtgttggcagactggttcagcatggtggctgcgaaaagaaaaacataaggtcttacttgataaacagtgcagcacaggaaatccaaggctcaaactccgttttgaccttcttgatcccaacagttagaagcaatcattctctcctgtcagctttcatatctctttacctattcttttgattagagatttttaaaagaaatcttttactctactaatctatagtcatcctaagaagggttcccgtgtataaagaacatgttttatatttacatgccacagttacattagcagttccatgaatttatggagacttaagtgcagctttgactcttcagcctcagctcccaacctttccaactcatcacccaatgtaccacaattcttatcccatcagaccctggatctggctatagtcatttcctcacctgacctggagccaggactgcacatgaaaatgaggcttccgtatcacaggttggacaaacctctctcataaaatgcttttgtatttctctacttcatgggtacacagaccacttcagggacttaaatgtaacccttaataccttttataaggtagatgttgtgttttaaataagttattttcaagtgatcctttggaacaaactttatgcctttacatttctattttccaagcatatagggggtgagaaaacatgaatattttccccatgggaaagaagtgaacgttttcaaactttataaggaaatgacttttctctttgtagttataatcaggaaaaaaataataaagcccatagcttggggtcatttttaattagaaaaactttttacctgcaaagcaaaaagtctacaaaccagatttttatgctgtgaaaattttttattatgcaatacttctttaaatgttttttaaaaaactaatattttcttatcttataaatgtatgaagattttgagtctaagagaccaaatagatttatgttaaaacttctctgggcctagatgaaattctcagatattttgtaagcaatgaaaaattaattttaaagtgtttttccccaatgtgtaatgcatatttataacctacagaacaaaaaacacaatcatattttggatctttaagacctgacatagcaaaaagataatttgctttgaggccctttgatgcatttaatttaatttattggaagcaaattaatgtgaaatgataaaattattattaaaatggaaatagaagaataggaatgactcaaatcaacagaggagagaagtggctgattaccatacttcataggataattcccaatttaatcatattaaatctaattgttggcggacagatgatgggaaataccgctcttgctttgtagtagacagaagaagacagaaaaaaattttaaaaagcaattcagaatgtcactaggataaaccaaaaagtaaactgaaaatgaagaccaaagtggatttcttaaggaaacattgcctctttacattgccaaatgaaaatttggtagatgaatattctatggttttagataatcatttgtaacttgaaagggatttatatacaacttaataaatatatattgaatgactgctattttcaagatattgtgctgctgatctgtcttctagctgataaatttagctgaatacctggagcaataatagaaccaagttttattgatcaacagcaatctctattaaaatggtaatgaacagcttctgcagtatatcttgatatattttctttttactgggtgtgatgaatgtgtaaagtagtagaacttatgatacatgtgacatgatgtaagttcatgataaatgctagaggattaatttcatatagctacatattgtcattatttcaaacttcagtgaaatgaaaacatgagtttttcactgctgtttttaaatttttgtgatttttcccctcagtggcaattccaaaataaatggaggaaactggaaattattctgaatattgtgtatgaataaccatcttattaaatagactcatttaaaacattttcaaaaatttacatctttctcaataggaaatgggtcctttaattctgctcatttctctccatttttagtgatgttattttagtctaaatttccataatctttattctgggctattatagtaatattccaacaggctttttctcttcctatttcttgggatattcctatttatttcccaaaccatagtcttaaacatcttaaagagaaatatacagaatctgaaaagacacttctcaaaagaagacgtttatgcggccaataaacatatgaaaaaaaagtcaccatcagtggtcattagagaaatgcaaatcaaaaccacagtggggtaccatctcatgccagttagaatggtgatcatcaaaatgtcaggaaacaaaagatgctggagaggatgtggagaaataggaacacttttacactgctggtgggagtgttatttagttacaccattgttggtgggagtgtaatttgtcttacaccattgtggaagacagtgtggtgattcctcaaggatctagaaccagaaataccatttgacccagcaatcccattactgggtatatacccaaaggattataaatcattctactataaagacacatgtacacatatgtttattgcagcactattcacaatagcaaagacttggaccaacccaaattcctatcaatgatagactggataaagaaaatgtggcatatataccctatggaatactatacagccataaaaaatatgagttcatgtcctttgcagggacacgggtgaagctggaaagcatcattctcagcaaactaatacaagaacagaaaaccaaacaccacatgttctcacttataagtgggagttgaacaatgagaacacatggacacagggagggggacatcacacactggggcctgttgcggggtggggggctaggaggaatagcattaggagaaatacctaatgtagatgacgagttgatgggtgcagcaaaccaccacgcagttgtatacctatgtaacaaacctacaggttctgcacatgtatcctagaacttaaagtataataaagaaatatataaaatctgattatttcaccccctcgatataatggaaagagtacattgtaagtcatacatctgaattaaatggaaaaataaaatgatatagtgctaataatcagatatacagaattgtagctttacaaagtataggagataagttactctgaagattcctttcattagaaaacagccagatggactggtaggcacctgtatcgcaactattcaggaggctgaggtgtgagaattgcttgagcccaggagttcaaagctgcagtgagatatgatcacgctggtggatagtgactgcactccagcctgggcaacatagtgaatttttttttttttaaagaacaactagattctccataaaacagactatcacactctaatacataactgagatcacaggaaatcagggagaattctaaaccctcttaactcattctctgagctcatgacagagtgggtagtaagtgaaaaactgaaaaattgcgtatttttttagagcagcttagtggacagacagtattttagaataccagaaagcacaagaaatgtgtgtgttgttatgcagaattcataaacaactcttttgactcaaggaggaaaaacataggatcataataaacaaacccttaacaggttggaaacaagaatagcctgtaacatatgaagggtcactcaaccttgttagtaattaggacaacctaactaaaatgtataaatgctatttcacataacaagactgaccaagggttgtgatgatacgcaataataggaacttacgtactttgttattgatagtataaactggtatggacatgtggggaaaaaacttgctcttgtcttacaatgttgaacattgaattactaacaactcagaaatttcacattttatgaagttcttcttagtgttgtttatattatgagatagaaactgttatctgtatagtacaccaagataagaataaggcagttcctgagtggaaacaacattatgatattctcttattgctgtcactcccttccttagacactggctacaaaaaccaatgaactaattcatctgggcataaattgcaaggttgagatagtgtgtcaccaatgctatatattattctgaaatttgtatgtgggttttcatgcaaaaccattgtctgtcacagtaaagtatcttttgtcatcactaagtaaaaaccttttcaagtaacagactcagaccacgtgcacacaatggatgggcttatattatgataggctggctatcctaataaaatattttaaaaagcataaatggtgggaagagcaatagaaataaagtatgtgaagaaggatactttaaaggtgaaaaagtataacaattagaaataacgataaattgaacaacaatgcaaaaggaaattcccaaaatgcttccaaaacaaggacagaaaagaaaaaagttaaattcagttattaaaaaattaaccccattttaaagccacttgcatttattagtgttaattacttgtgttaattttaacacaagaaaatggcaaactggtaatgccttcctactgtaatataaagttacttcaaagaggaacattttctgaatgacacaatgaatttatcaaggacatggggcttttgggaaatagacctacgactgttggttctctgattatctcactgtgggctacttctgttttcattatttatttgcgatgtgggcacattaccaaactgctttcagaattgcttaatgtgtaaattcctctgaaactttgaacaagagatttttgacaggtatgattagtaagtaggatttcaagacatttgacttcactgaaaaattttactgtcatgacccctttaacaatctttttacttctggagatgtgtttccaatttgggttattattaatgactgatgtattcttaaaggaagagaaatagaatattatagacttatttcacagtaagacaagtcattaaaaataactttgaacttcaagaagtagtagaaatgggaatttgaattttcagaccaaatagatcatgacagaaatcaaagtgtagaattacaataaagtaaagagactggatcatttcagtctattttgatttgacattataattttgtggttgggaggaaaaagaaggcaactgtatttcatcagctttgaagacttcgttgtcgtgaagaaggctggataacttccttatgttgtcactatcttgcttccatccagagactgtggagtctttctggaaccaatatggttgaaaaagcctttcctttttagtcagcagggcttagtattcacagcctctgttttaaatacaatgtaacttgctttattacaaggcatactgtgacttataaagctagaaattctgttcaggtgattacagatgaaaaaaatgatgaaaattgagaggttgccagctcacgttcttttctttctcactaaagagtctgcttctattttggtccattttaaagtttccttaactcctcgagtcacagagaaagtagtcattcttcagtgttgccagctcctgattccagatgagctaatgattccacagagctatctctttggttcttaactctgcacctttactgatagtcattgtagtttaatttttattatcaatgtttatagggcctttgcggtgtgtcaaattttaggcaccccaaaatataatagcgaacaagacattcatggtcactgccttcatggagcttctcggctagactgtgtataaattttcaatctacagagaatgtctctatgtttaataacaatagaacatttgtattgactcttaccaatacatgtaaactactctttgaaaagtacactaaatcccaaagtgtcttttggaaaaggaatgttacatttttaaaattagacctgatagtccatagttgaatgctaatatgatggtcaatgactaggaaaaatgttccaattcaaaacaatttcaaagttttcttcagtacccttgtatcatcatgacttgggaaaatcatcttaggaagtattggatgttatcttggaagttaatttatagaaacatgggtggggcattgtagatcatttagtccttaaatacatttttggctgaaaggaaatctctcattaaaagggaaagaaacagaagaagagaaggaagaagcaaggtaaggtatttgctaggatcacataactggttagtggcagaagtagaaatcatttccttggactctttagtgctttattactgccctcttgtaagtttgttgcttttccactgactgttgggtaagaaattataatcccagaacagttctttgtatattaaaaaaaaatcctttacatattccatagaaactgggcttggtttgtaaagctgaggcccaggagaagctctttttcttacccatttggtctttaatgttgcttgcgaatgcatgggggtagaactctaataacaatgatggacacgatgtccttgcacataaacatttggctcctcacagcatgagatgtctggtcagccacagaggataaaataatggcgtaaagatttactgtcagggagctgggccagtctcagcaggacagcggctccaagcagatagatggcctggtatgcgtaggtcacctgtgtttacactgatgaatgtgtgtggtttccctagtctgcatcattatattgagttgtgtggtgttggtagcacttgttactcaccctagaatgtgcctttctattgaaagacaagtagactaatagcttggcttcccagaaataaatgagacaattcacatgaaagcaattgcagttagacaaaatgacataaatattaaagattaagaataatattatttgtatctgtaatatacagaaatagtcaaaaaatacttggggctgcataatttgtggttgtagcagttgctgaatttagtcccatatagtgatttggttgcataatttaatgtttatgttgtatttgtttaatacatcactttcctgaatgaaatgattgtggtatgaagttataagaaataatgtctttggcttgttatagaaacagttattttagggattttttgtacttttgaagcagtttcaattacaagtcatttttcatgagttctgaagtaagttttaggcatttgttatgagatcatattattagcagcttagatgaaaatccaaaatgcatttatggatattttaattggaaaattaagtggatcttttataaaattaaatactctgctataatctcttagaaaaaataaatcccttttacctaataggcaagttcatgagaaatctgtaatgatatctctcaacatagcatgttaacttatagattatataattataaatttataagcctagtttatactaagtatattcaagttataagtcacaatacgtgaaatgaacataattctctgaatatgtcacattttttaaagatatctgtaatcccagcactttgggaggctgaggcaggtggatcacctgaggtcaggagttcaagaccagcccaaccaacatggcaaaaccctgtctctactaaaaatacaaaaaattagccaggtatggtggtgcacacctgtagtcccagctactcagaaggctgaggcaagacaatcacttgaactcgggagacagaggttgcagtgagtcgcgatggcaccactgcactccagccttggagacagagtgagactctgtctcaaaaaaaaaaaaaaaaaaaaagaaagaaaaatatatctttattttcaatattactgtcagtgcctgaaatcatgccttgttttgctttgtctacaaatatattctttcaaaaatcatccataatgaatatattttccattctaaggtgtacttcatttttggaaacagaaaaatgccaattatcatccatgcttgtgaatacagtaaataattgatctccctacatgttacctttttaaaataaattgaacatgaataatgagtctaatatagtacaacaggtgtttctgacaaatagtattggaaaatgtattgctatttgattttctatttatctgtgaagtccttttaaagatatccatgaaaactctctcttatgaatgtatggctaattgtaaagtagaatcctcataagaccagtattctatgatttcctcttgattaaataaaataaaatttaatgtgacaatggtttgtgtacttttctttccttgtcttctctgagcatctctctagaaataggaaaaaaaaatgggataggttttgtttgggtgatttccactgaagcatagcaaggtcatgcttttgtattgtctattatcagttataatttctcaaaaacagacagcaaacaggcagtgttcaaaaatttgtaatttactatcccgtgctaaagacaaaccacagagtaaaaccgcaacccggttaaccaccaaaacaaccttcaatcattctgactggttctgcatgtttcaacgtttatggtcttttggctgaaggccaaagttcatctcttattaccctttcttttccatctgtgaagatcattgcacacacactcgttctgcattccaaacaatttcacctggcaaaggaactaagtaaaactgtctctcatcttcattactattcatttcatctttcaaatcactgaatcgtgaaaattagaagtaacaaaaaaaagaaatcaggtgtattaaaaacaaaaatttgaaacagtatatctgtgaaaccgctcagtgttagaaattgtcactgatccatgtcaaattcagcaaacaaaactgaggcaatttactttcacattttactaaatggccacttgtaagcatacggatgagattttgtctttccccaggctggatcagtctgttggtttcccaaacagacaggggctgagtggcttaacaggtgtgccaatgtgagaaagaaacacaaaagcagctgttgttaaaggcgttaggtaggctttgccaagactttacctctcagatctcttctgtgaattgatgactaaagtatgtcaactttggaaaaatattcttgaaatattttccttgatttctgacttcaaaaggcaaattataaacaccttaatcaattaatatttactactagaatgattgcccaaaagactgaactaatcaagatagaaaacaaaagtattatggcttattatgtcaatctcctatttaaaaagcctcaacattttctcatagcctttagaagaaacaattttttgtacattgagatcccaattcaatgcctctttttgtccatatctcattgcaactttgactcatatgatatcactttgctgcaaacagattaagctactaatgaagacatgcaattatctttttgtcatctctctctctctgtagctctctctgtgtgtgtgaatacatgtatacttgctcaactaaaatgatcctcacagcctcacatattaagatctcatttattctcaatttgggcttgacttctaacaaaaactgttccttaactaatccaccaatagatggcatattcttctcctgagctttcatcctgtttatcatttacttggtattccaacctacctctatggcattgctttacagatctttaatgtggtctcgcattgatatggaaagtttgcttttgtagatttaacttatcatgtgagtcaatcaaagatttccaaatagttgatgaactttatgagagaaaaggcctgggttttctttctttgcctcccttcaggtacctggtggaggatgctatttctagtagctacttcaaaaaacaagttttctgagttgctctcttatttctttaaccacattgtctctgtcgttctctgtctctctgtttctctctttctctctctattcttttgcatggacaccaaattttgtctcttagattttgaccctcttatctttgaatactggttttgttctctaaactactagttttttgccataactgttttttctttgggattttggactgtatttcttagatctaaggtacagacctcctgcagggacttccatgaaccatatatccattgtagcaatgatcttcattgtcaaaaagagtctaattttaaaagcaaagatttgtcaaagaaaccttttagaatgcaaaatagctaggaattttaattctattaaatatcaacaataacaaaaaagtggtaactatgattattttctttttgacaaaataagttcatcattaaaaaaaccaataatgccaaatcctaaaaataaatttcagcctgtaaaacatacattcaagcatgtataaatatatgcatgtacaataaatatatttaaaataatttttaaatttctagactgttgactagtgagaaactagtgaaactatcgagagttgggaacattccgtgtaagggggtaatgaagttgagagtgataatggtacctctaacttatggctcagactgaggctagattcaccaactttgcatagcgtcctctgcatttagattttctattcaacattcttgcaatatcttgaatgaaggcatagaatggcagcacattaaatttacaaacggtaaagatcaaagaaggaataactgaaattattttgagagtgtggaattctgagctaagttatagtgctggtgtttgaacggagttttaatatgagttttgcctgttaggtgatttctgccaaaaaaaaaaaaaatacgaagtttgcattaatgaaagcagagtattcagctaaaaggaatattcatccttttcattttgaagtttgttattataccatatctggaatgttttgtttacttctgcatggacattttaaaaaaacattgaaacaggagacaatggcatgaaaaggatgatcagaaagatgaaacatttggaattgatgctttatgagggacattgaatatactggaagtatgtagtctaaagcagagaaggctaaagggagatatgatgcaaattcatgagaaatgttcatacctaatatttatgagtcaaatgctaagtataattctcatgactgatccagtgatgaggtaagtgtgtggacacagaaaactgtcacaatgcacagtgtgaaaagaataacagtagttcttacgtcagggtacaagtcgagaaaacgaatgcctctatggattacaggtggagagaaatgtgatctagggaaaaggggaaaggtggtattaggcagagattagaaggtgctgtagtttttgagctggagcctagaaccccacactctctcagcctctgagctgcagccacctcccctgcagctactggagacaccgcagccactaaggctgcaggacctcctgctactgaccgtgggtacttctggtggctgctgccagaaacccaatcccttgtttattctctgggtttcaattttacccccaaacctgatgaaataccgttggcaagggagtcttagaaattttagttttcttattctcagtgattaaagaaaagggcgcagagaagattatgggaatgttagaaggttagttagttaccatctagcacaaatgggattaagtgttagaggtctaggcaggatatatagagataaccaatttaaatggtcaaggaaggttaatatctataagtactttcaggcctgcctttggaaaggcagagtggagttctgtgttgctccagagagcaatagatgatagaagttattaggagatgaaatttaggtatttgtgaaaaataacttcctcataactagagctcatggcaaaaatgtcctgctattttaatatgttgggtgtttgagcaaaagtttaattctatttttttcagggattctctagaagagcttctcatagtaggcagtagatggtttagttggcagctaatgttccttaaaaatttacaattttatgattcccaaaccactcatctaaaaataacaaaatgtgtttaaagagtagattagttaatcacaaaacataaaaggtaactagccaaaagaattaaatatattcatcacgtcttaataactttgaggaaaatgagtacatgaggtgggaaacgaacattaaaggagtttcttatcagcccttttcaggattccaaacttttcttataaatatccatcagtgctccaattaagcctttggagtgatatgcaagaactccatagtggggagggaaaagtgcctccttccacacagatgttggcacagtgctgaaggatggcggctggccagcctgctttacaagtgagggccaggagcagcatctgcatatgagagcagattatcccattggcaaactccattaacactgccaagggcacggttatgctgttagtgactaagaagtcatccctttcacctgaacatacctctggtaatttagggtaataaagaggatgcctttcttttatatgcaagagaaataaagacttgaatggtaataagggagggcaatacatattcatttattatgtaagtaagaaaattcactggtaaataatctcataatatctaatgattggatgatatctaagcagtatgtcgatgatatctagtttatccaccattgaatcccttataaaacagaccagtcagctggtacccagtggtcttacatacagtcaaagatgggaagctcaggatccccacatgcagccaactggaagatgggatagcaaagtcagaaagacctgagttcaaatcttcactatgttggtcattaactatataaacttaagtattttatatcatcgagctaaatttcagtgtgtatacctttaagatagtaatgtgtacttcaaattgttgttacaaaattaaaagaggtaatgtgtataacagctatctcaataaatagcagatgttttaattccaatgtgcctacttcacactgttgttacaaaattaaaagagataatgcgtataacactatctcaataaatgggaggtgttattctatctttcagatgtctctaatggttagaaacgctttatattaaactgatttttttctctataatttaagcctgctaatcctcattatgacttaagggcttcttaaaacaaatgttatatcttttatcttttactgaaagtctttcacatatttgaaaataagaatcgttaacttcactcatcatttcttttatggactgaacacacccagtccctcaacctttccttgtattccgtggctcttagccacctcaccatagcaagaagtgaggcggggaatgtggaaggattgtgattaagtggttgaagtgcagagataaggatgggaaatgcagggtaaaaagcactggaacaggcccagctttgttttttggccaaaagattcagcagctctgatcggcttactgatattcacacggtgctgaggttggcatttttccagaggcattaagcatcattccactcacggttgacagtttccagaaaggtttctcccaaaaacacactctcctttgatttcttcctgaaaatcatgtatctggtactttatcattttagctcatatatccacaggcagccctgggtgaaaccacactttcactaattttaatcatctatacttaagggcttttaggttttttttttaattgggttcattaaatcatactttaatgcattgaaattcaccattttcatgtgtacggttctacgaattttggcaaaggtatgcagtcatgtaaccactgcccccaaaaggacccccatgctccgatgtaatcaatattctcccccaatccttaacccctggtcaccactgttttgctttctgtctctgtagttggaccttttctagaatgtcacataaatgaaactatatagtttgtacccatgctatttctgcttctttcatttaatatgatgctcttgagactgtaagttgtatagcatgtatcagtagttcccttttttgcagagaatttttccattgtatcataatttatgtatgtgccagagttgtttgcttatccactcactaggggatgaacattggagagtttttctttttctttctttctttctttcttttttttttttaaataaagctgcaataagcttccatgtacagatcattgtgtaggcacatgtattcattattgttgggtaacaatgttggagtaaatggctgggtaggatggtatatgttcatttttgtatgtttaattttatgagaaaataacaaacatggttataccattttgcatttctagccaaaaaatataaaagttttagctgctttgcatatttgtcagcaattggtattgtctcttttaaatacagccattttcataggtgtagtgtttttttaatgtagttttaaactgtaattcactcatggtcaatgatgccgaacatttttcatgtgtgtgtttgccatccttatctgccatccttatcttttctttggggaagacagttcagttcgttttctctccttttttttttttagacggagtcttgctctttgtcacccgggctggagtgcaatggcacgacctgggctcattgaaacctccacctcccgggttcaagcgattctcttgccttcgccacccgagtagctggaattataggcgcccgccaccacgcctggctagtttttctatttttagcagagatgaggttttaccatattggccaggctggcctccactccggacctcagttgatccgcccacctcggcctcccaaagtgttcagattgcaggcgtcagccactgcacccagcccagtttgttttgttttgttttgtttattggtttgttttctattattgagttcattatattcattatacataatttgcacaccagtccttaattatataggtttttttgcaaatattttccccacactgtggtttattttttatattttaacagggtctttcaaatagaatgttttaatttttatttatcagtgtttttcctgaccagtttgtattttttatgccatataaaatatctttgtgtaaaagatgtcacaaatattttctcctccattttctttgataatttttgtagttacatattttacatttaggtctatgattcattttaagttggttgagtctttttctgcatatgcatatgtaattgaacatttttttaaataccatattttctccttttaattgccttagtgccttcatgagaaatcaactgaccttatatttgcgagtctgtatccagacactctagtctattatttcctttgtctatatttatgtccttttgcaaacaccaaattgtcttcattgcataacattagaataactacagaaatcagagccgggtgcagtggcttatgcctggaattccagcactttggaaggctaaggcgggcggatcacctgaggtcaggagttcgagaccagcctggccaatatggtgaaatcccatctttaataaaaatacaaataatagccggctgtggtggtgcatgcctgtaaccacagctacttgggtggctgaggcaggagaatcacttaaacccgggaggcagaggttgcagtgagccaagatcagccattgcacctcagcctgggcaacaagagtgaaactccatctcaaaaaaaaaaaaaaaaaaaaagaaagaaagaaaaagaaaggaaaaaaaaagaaatcagttaatgtgagtcctccttagttgtttcactttctcattttttttttaattccattctagatcccttgcttttccatataacctttagaatagctggatcatatttgagattgcattgaatgtataattcagtttggaggataattgacaatctaacaatattgagtcttcccaaatatcggtctattatatagctccatttatttaggccttttaaatttatctcttttatgttttgcatttttaagcccacatattttgtatatattttcttcgctttaatttttgtttgtattttaaactgtactttttccctcatttgatcatgaattgttatttctaatataaagaaacataatggaatactttttgtatcctatgaccttggtatactcactagttttagcagcttttctgtaaagtgtttgggattttctatatacgccaccatgtctactgtgaataaagaaaattttatgtttgctcctttccaatctatatgccccaattttttatttattcatttatttatttatttttgtagagttattacattgattaggacctctaggtgaatgtggtaaaagcaagcctccctgctttcttcccagtcttaggggaaaaacgttcagtcttttcccagtaagtatgttacctgcaggcttttgtagatactgtttatcaggttgaagaagttcttttctattaccagtttgctagggtttttattataagtgactattgaattctgttaaatcatttttatcatgcgtaaagatgagcatatactttctcttcttagtttgttgttacaataaattccttttttttttttttttttttttttggcacagtctcactctgtcgcccaggttggtgtgcagtggcatgatctcgggtcactgcaacctccgcctccggagttcaagtgattctcgtgcctcatcttcccgagcagctaggactacaggcacgtgccaccatgccgggctaattttgtattttcagtagggatgggtttttgccatgttggccagactggtctcaatctcctgaccttaaacaatctgcccatctcagcctcccaaagtgctgggattaccggcgtgacccaccatgcccagccccatggattggtttttgaatataaaatcaacactgcattccggacaaaactccacttggtatgatacactaaatgttttatatattgctggatgtgatatgtaaggatttttgtattcatattcatgaaatatattgatctgtagttttctttaacataatttctccacaaggttttctatgtactaatggtggctcataaaatgaattggaaattctttttctttattgttagcaagattgtttagaggtagtaatatttcttccttcagtgttggaaaaaattcactattgaagtcatttgaacctcaagtttacttttttgcaagaagttaaaccaataatttatttttttaaatagatataggactatttaggctgtttcttcttcagtaaatattagtttgtatctttgcatgtgtcgacttcatccaagttgttgaatttggggagcataaattggttaatagtactctcttgttatcctttttgttttgttttgttttgtttgagatggagtcttgctctcgcccagctggagtgcagtggtcagatgttggctcactgcaacttctacctcccaggttcaagcgcttctcgtgccttagccttccgagtagctgggattacaggcacccaccacaatacccggctgatttttggatttttagtagcgacggggtttcaccatgtgggccaggctggtcttgaactcctgacctcaggtgatctgcccatcttggcctcccaaaatgttgggattacaggcgtgagccaccgcgcccggcgtcttgctatcctgacatttatcattcctttctctctctttctgtcagtaatctggataacgatttattactattattgattgttacaaagaatcagctttaagtttcacttattttctctattattttaatctgttttcaagttataatttccctgtgactatgtctttgacccttgggtaatttagaagtctgttctgtaattttttgttttgtttgtttttcatgtttggggtttttaagatacatttcggctgggtgcagtggctcatgcctgtaatcccagcactttgggaggctgaggcgggtggatcacctgaggtctggagttcaggaccagtctggccaacatggtgaaaccccatctctactaaaaatacaaaattagccaaatgtggtggcgcatgcctgtagtcccagctactcgggaggctgagacaggagaatcgcttaaacccaggaggcggaggtggcagtgagccgagactgtgccattgcactccagcctgggctatggagtgagactctgtctcattaaaaaaaaaaaaaaatacattttgtaactgatttctatttttaattttataacacttttaaaattatattgtcttaaactgacataaaaatatttatgtataatatgtaaattattacaaagtgatgcttcagtacatatactgtatattaatcagaatgggataattagcatacccatcatctcaaacctttgtcattacattatgttgggaacattcaatatcccccttttagctatttgaaactataaagtatatgattattaactataatcatcctaaagtggtatagaacactagaacttattcttctcatctagcagtaatattgtatcctttgataaatctctccctctctctccctgttccctaccctttccagcctctagtgtcttctattatactttttacttttatgaggtcggctatttttagcatccatatttgagtgagaatatgtagtgtttaaggatcctgttcctggcttatgtcacttaacatagtatctattagttctatatacgttgccacaaatgacagaatttcactgtttgtttatggctaaatagtattctgttgtgtatatacaccacattttctttatccattcttctcttattggacgcctaagttgattccgtatcttggccattgtgaatagtgctgcaatagacatagagatgcagatgtctttttgatatactcatttcatctcctttgggtaaatgccaagtagtgggattgctggatcatattatagttctatttgtaatttttgaggaacctctatactcttctccactttggctgaactagtttacattcccaccaacagtgtatatgagttctgttttctccacatcctttcaagcattggttacgttttgtctttttgataatagccatcctaactggggtcagatgctatcacattgtggttttaatttgtatttccctgaggactagtggtgttgagcatttttcatttgttgcatatacatgtcttcttttgagaaacatcagttcagatcatttgcccattttttaatcaagttgttttgctgtttagatgtttgagttttttgtgtattctagatgtgaatcccttgtcagatgtagagtttgcaaatattttatctcattctgtaggttgtctttcagtctgattgtttcttttgctgtgcagaagctttttagtttgatatgataccatttgtttatttttgcttttgttgttgtacttttgaggaactttttgttactcataaaatattttccagaccagtgtcttgaagaatttatgctctttgcctccagagatcttataatttcaggtcttatatcttggtctttgttctattttgagttgagctttgtatgtggtgagaggtgggggattagttactttctgcaggagatactcagttatcccagtaccatttattgaagagcctgtcctttcctcaattagtgttttcagtacatttgtcaaaaaatcaattggctgtagatacacagattagtttttgcattctgtattttgttccattagcctatagatgtttctatgccagtaccatgctgttttggttactatggctttgtagtatatttttaaatctggtaatatgatgcttccatatttattttgttcaggatttatttggctatttgggtcttttgtggtttcatacaaattttaggattttttttctatttctgtggagtgtcgtttgtatttttatagagaaggcattcactccacagattcttttcgatagtatggccattttaacaatgttaattcttctgatacatgagtatgatgtatctttctgttcatttgtatcctcttcagttttttcatcagtgttttgcagttttccttttaaaggttttgtacctccttggataaattcacttttaggtttcctctttttttttttgtacactattataaattggactgtcttcttgatctcttttttttagtttgttgcttgtgtatagaaatgctatggattttcgtgtgtcgattttttattctgcaattttactgaattggtttatcagctctaagagtttttcagtagaatctttaggtttttctatatataggatcatgtcatctgcagacaggaacaatttcacttcattcatttgaatgtggatgccctttaattttcatttcccaattgctctggctgggacttctagttctatattgagtgcaagtggtgagtgttagcatctttgtcttttttccagttctgagaggaaaagattttagcttttgcttctttggtgtgatgttaattgtgtgtttgtaatatgtgccttttattattttgaggtaatttccttctacacctattttattgagatttttaatataatggcatattacattgtattaaatgttttttctgaatctatcaaaatgattgtatttttgtctttaattatattgatttaatgtatgatgtttattgatttgtgtatattaaaccatcctcacattcctggcataaatgccacttgattatgttgtattatctttgtgatctgtgctggatttagcttgctagtattttcttgaagattttgcatctgtatttgtcagaggtattggcctgtaattttcctgtgtgtgtgtgtgtgtgtgtgtgtgtgtgtgtgtgtgtgtgtgtccttatctggttttgttattagatttagactgggcttgcagaatgagtttggaagaattccctcggcttcaattttttgaaatagtttgagaatgatttgtattaattctccttcatagattgaatagaatccagtgatgaagccatccagttaagtacttttcttttttgtgagactttttattactgattcaatcatgttacttattattggtctattcaggttttctccttcttcctggtccaatcttggtaagttatgtgtctaagaatttatccacatcctctaggttttcaactaggttttcagttggtgtatagttgttcatagtagtctctagtgatcctttgtattatgtggtatttgttatgatgcctcctttttcatttatgatttttatttgggttttctttctcactttattgctagttagcccatattgtatgatttcaatcattttaattcttttcaaattcattttttgtctcagaatatggtctatgttgttaaatatttcatgtgtacctgaaagtatatttttctgttcctgcatattctataaatatcaaataaatggatacaataatactttcctgataatatattttgaatgattcaggaaaacttaagaaacgtaagggttaattatgccactaattaaaaaattcagaaactttatgacaactttcatctctcatagccactttgactgcacagtggctttgttctcaaagccttgaaattgagttattgggatgtagtagaagcagtttgaagaacaggcagtaagcccaccttctccattagtatgttctatttactttgacatggagattttgcagtagtttgacacaaatctgaatagaaacctatttaatttcagacttctttacccactcttagaatttttcttttgatagcagataaggattaagtaatatacacaggagacagtctaagaagcatatttatttaaatataactttgttataacatcaattgcgtgtaaccaatctcatgccaaaaacaaatgcaaaaattctgttgcttaggattttactttatgtgttttaagtatatattgaaatgtacttcagaacatgtgctttttaaaatttatccaactttggtaattttggtttttgaacatcccgtagatacctaaaggactcctttggagcagcagtgctatatggatcacacttcaaaagtgtaattctggggcagcaatatgaaggtcaaaacatctccctccaactaggaactggatatttaaaagaggttaaggaaatttgatgcactgtattaaaaattgtttcaacctttttttaaactttagtgtaagtactacaacattttactaagcaaatttggagttctaatttaaccgttttttcatgttctttatcttagattctgaggacaaaaagcaatgaacacagctttttagtagctatttcctttcaaactctctggagagcaatcaaattttgtaatctgtaaaagaacatacattaatgttttgttcaaagagaattcaatctataataggccttttaaagaaatatgtataaaggcccgctgtctgtcctttttgatattttagtgtatgtatttgttcagtgtagttttgtttctttttaagaagctaatattttaggaagaaccagatactactaggccaagtacattctttttgtgtaactagaaatttcaggtcttttagttttccccaggcaacatctgctaagaacatagcattagttacatactgcttggaccaaccccatctttgaatatcacttgtagacatagtcacctaaagaagcaactaaacgttgacctaggggtccactttggcaattttgcctgcacctcattccagcgtatgccatggactttttttctgtttatgaagaacgtagccagagatagtcctaaaatagaagctaagggaaaaaaacaaaactctcacttctagatgtgcgaactctagcaaaaaaaaagttttaaaattctgccctgtttatagtcttatagacagactcggattaaaaaatatactttaactgctttatttcataataaaacagagacttttccacaaacttgggaagtgaatagaagcaatccactttaatgtattcctcagaatgagtatattctcacgtctcaacttaacaggatattccacatgtctatgttgatcccatcactctcaattacacaaggagaccagtactgccacaattccaagccagagggagcagtccatctttcacagccaagggaaggactggagtgagaggaccattctcactatagtcatagctagccactcccacactggcaactgaggctttgctccgcccagtctggtagactacacttttctattcctaagatccctgtcttattcatgtacaagagttttgagagaaggcaaccccattcccttaatattaagtttaattatacagtttccacctgttcacttcaatagtggtaattcttaggacctagcactcccagtttataaacacaacgaacttcaaaggtgccatccagctcctcaaattcttgaccaggacagcttatctcagagttagaaaactcccaacccttctctctagaaatgtcttcattacattaagagacttttcttcttaaactgtaaaaacaaaacaaaagtaactgattagtatcctctttctctagacagtgaagtcattagtctactcctggaggccaccatgagttacataggaggtttcccaagacccatcacctgtgtgaaggtctatatacctagactttggaaaggaatgaaaataagaggcaagctacttttagtctctgtctttgctatcatactcttcctttaaactatttctctctatcccacctctgtctctttctttttctgtctccctgtttctctctttttttgtcactcacacacacacacacacacacacggacacacatatacaaaagcaaccctgtaaaaatcactgcttgtgtaaagcctaaaccataattggggttagaatttggagctccactagttacgcagagaatgatttctgtgggttcttaactttctaagcttcaaatttcccatacataaaagtgatagtctaataattgtgaactcaaaaattttgtgataaataagttaaataattcctatacagccttcaggacaatgcctaaaccagaataaaaataaagataatgataatttagccttatatttctccttccattttagtcaaaatatttttaccaatccacagatacagtattctctttcttttcttttcttttttttattttgtttttatttttatttttttttgatggagtctaactctgtcacccagactgaagtgcaatgttgtgatctcagatcactgcaacctccgccgcctgggttcaagcgattctcctgcttcagcctcccgagtagttgggattacaggtgcctgccactgcacccaaataatttttgtatttttagtagagacggggtttcaccatcttggccaggctggtcttgaactcctgacctcatgatctacccacctcggcctcccaaagtgctgggattacaggcatgagccactacacccggctagtagtattctcattttatctgaggttatctccacattgcacacacccatcagagatgctctctctcatcctggtgaaacataaccattccaaaacgcagtgaccgttcactcttcagcaaatctttcttagttgaaatagccctcactgcttccctttttctcttattcttacacacatctcaaaatcagttctctattagttccaggagttgtttccttgtccttcgagtaattctacatagacaatcatgttatctgtgaacaaagacacagctccaagggtgagaacgggagctttaaaatttcttaaagctcatgcctatagaagtcattcagtgccatctctgcatctgcatgcattctcttggccaaaacaagtcataggaccagtgtagattaaagatgtgagactgcgggagaggagaaacacggcaaagtcacatcacaaaaaaccacttggaatgggaacacgggttatcctcctttttgaaaacaaactgtgtcactaatattgtcagtcttattattacactcaaatggattacaagatccctaagagtaaaaagccatagttttagtatttctcaaataggtacaatgcactgtaatgttggaatgtgtctttagaaagataaaataaccaaacaatcataacacattattctcaaaacttattttatatttttgttttaatgtgtacaattgcaatctcatatttgtgttagaatcatttgtttttgtgtcttcatgtttctataagataggaccaatattctttattgggctttgattttattttgtaacttaaatgtattaaggcaataaatgtaattttccacttaaaactatcattatagatttggttactacctactgctcagcaattttttttcttatcaaaattcttcctggttggtttacttctcattttttttccattaaatgatataaattttaagatagtagtttttcttgttacattagttcagaatcatagattcatgcataatagctttgatattcaaataaccttcattggtcttgatacttttataattttcatttcagaatcccttattgccttccattgaattcttctggtttgtgttataacatttcctgtaatttgtaagcaatccattctgttttcaaaatcacttgtgtgtaaatttttctcattaccatgttcatttcagttttaactaaagttcactcataatatgtcatacataaagaaacacttaaaatatattagaactatttacattctatatataatagttatgccagaaacgaaacagaaatgttgaattaagtttagcctaaagatgctgtcttatgtgttttaagtttggcctaaaggtttttccatacatagtgaactgtaacctaactggatgtgtaaacagagtatagcctactcttgtaacaagtagccaagtctcatcccattacgacaaccatacttcaatcacacacagggtccacctgttcaaactgtgtttgaataagccagacaccagctgtaaccaatctggctgtttctgtgcctcacttccgttttctctatgtagctttcctttgtccatacatcctttccaaacctgcagtggagcaccatgctcagctaattcttaatttttttttctagagatagaggtcttgctgatttgcccaggctggtctcaaagtagtggcttcaagagatcttcccaccccagcctcccaaagtgctggggttataggcatgagccattgcacctgctggagcactaatttctaaacaaacaaacccaagatcaaattagccagtcagagtgtgtcctacttacattctgtacataaccctactaaaacctttatgtacttactgttatgaatacttttagttcgtccctggcagaggtgctaaatttcattccctgatatttagcatgatgtcaccaaatcgtagttgtttaataaacatttgcgtaatgaaagactgactgaatgaatgcatgaagtaactatcagctacaactactaaactaacatgaccaagattcaaaggaaactttctaaaatcttcaaaaatctaagttctagtgctctttcaagacctcagaactgccttagagagtttaatggaaataacatacataggagtatggggaaaagtgctatttacttagcaactatgtgtcagacattttataagtagtgtcttacgtactttcttagtaatattttgaagtattagtagatagcatttatctaattttagaaataagaaaatggaggtgggctaataagttgtttaagattccaaacattctgtagtaaaaccagtattgatcctaatttgatggactttaaacctgctgagcctctgtctggtggaggaaaaaaaaaattaaaaaaaaaagcatttttcttccttcttaggttcagtggctgaggcctgtgaattatactgacaaaagagagattatcaagaataaatatttatttgatgtgtaggggctggggaggaacaggggcagctcacataaaagcaaggaataccccaaagaggcagttggacccgggccctgtatcccattttaacaaagtgtgataaagtgtggggaagagactagataaagaaaaggagggtttaatccctgggtggccggagtaggttgtgggaaaatgactaggaaatgtgtagtaaataagggctatttagtaaggtttgttatgcaaccttaaggcatctcaggtggtgacttattcacttctccctgatataagaaagtaggacacctttacaggtataagtttcctttacaaccagaaaattcatgccttgctgaagacagttcatcttgtgtttgctatttctaattgccttcagcttaaaatactccttatgctaaagtggcatattttggggtagcatattctgatctctttcaccccaaccaacaagactgtggctgttggcaggcaaacattacatcttatttatttacacttctctgatgtctgtaacagtgcatagcacagagtaggtatccagtagatgtttgagaaaaaaaaaataataaatgggataattaacatttttggcttctaggagattattttcattccaaattggccttctcccgctgttttttcccctcatactggtgacataccctcctgtttggtcagaaagaattctgatcttggatcatctgaaatacatttactaaaaaaacctgatatgtatttacatattgaaagcacatctgacttaacatttaggagcatgggctagcaatcttactagtttcaagccttggctccaccaagtgacttgctctatgaccttaggtttcatagcctcttaagtctcagctattttattttaaatgatgggcaaggctttttgctgtttggtttacttataagtcctgagtgcctgaaacaaaataagtattcagtatgtttggttgaataagtgaatgccatgtagtacctattttggttgtcattggctttaaagaggtgaatatactttaagtggttcaagagctcccacaccataggagcttaataaatgttagccattttattatgtaagtataacccttcacacactttcactagtcatttgttataacattgactttttcaaaagttctgtggaaatgagttataagactatccattgttgaaggcaatgttcttagttgtattcattgttatcaatttagtcattaaaaaacatttgctttccttatcaatacatatgcttcattttattagtaagtagaatttcataacccatcctgttttccatttctcttgcatactaggaaacacaaagtgaaatttggttctcgagctagttcagtcacataatgttgttggtaaaattatctataacatttggattcttttggatataaatttgcccttgataggctaagctatattatattttctataatcttgtgttctataatattctaaaatatcgttctgtaattattttatgagaaacattcttcataaatatgaaatgtatatcataaatcagtttgtttatgatatacatgtttttcatgtaatttaatgatttaattgtaattatcaataaatatgcgaaatctaaacattcattggcaaatatagtagaaactataatgaattggctatagtgtttctcatgttagacattgttgacctaaaaagaagaaactgaggtgaaattaatggagtgtttatctgggcaaagcttgaagattacaacctgggagcattgattcaagttttcctaaatgtacactccaatttgtggcagctacaagtgtttgtgttcttttttttaataatttcaactttcattttagataccgggagtatatgtgcgggtttgtaaacatgtgtatattaagtgatgtggaggtttggggtacagatcccatcacacaggtagtaagcatagcacctgtagtagtctgttttcatgctgctaataaagacgtacctgagaatgggtatttataaagaaaaagagatttaatggactctcagttctacatggctagggaagcctcacaataatggaagaaagcaaaaggctcatcttacatggtggcaggcaagagagaatgagagccaagcaaaagaggaaatcctttataaaaccatcagatctcatgagactttttcactaccatgagaacagtatgggggaaactgcccccatgattcaattatctcctactgggtccctcccacaacacatgggaattatgggagctacagttcaagatgagatttgggtgggtcacagccaaaccatattggcacttctacactaaaaagtatccaagacaagtctcaatcaatttagaggtttattttgcaaggttaaggacatgcccatcacacaacctcaggaggtcctgagaacatgtgcccaaggtggttgggctacaacttggttttatacatttagggagacatgagacatcaatcaatatgtattaggtatatagtggttcagtctgaaaaggtgaagtgagggacttccatgttatacgtggaactggaagtgggggaagtgggaggcttccaaactggaagtggggttcttccaggttataggtggatacaaaggttttctgattggcaattggttattatctaaagacctggaatgcatagaaaggaatatcttgtttgtgataaggggttatagagaccaaggtttgatcatgcagacaaaacctcaaggtagcaggattcagagagaatagattgtaaatgtttcttatggaacttaaagagtcacttctattggtcttgaggtctgcattggtggtaacaaggcatattttcaggttaccttcggaatgcccttggctgagaagaggggtctattcagatgactgggggccttagaattttatttttggtttacatatccaataggtagcctttcagcccacagtgccctccctctctctgtcctctagcagttcacagtgtctgttgttccgaggagtgcccaatgtttagctccttgttataagtgagaacatgctatagttggtgattttttttttttaggagaaagaggcagttcctgaattgtttactaagaatttacataaaaatagcttaagctattgattagctatacgttgttctctatatcagaaattccagaaacaagaggataaggggtgaagcagctaatcaggaacaaaatgaattgaaataattgcccccagacgtgggtgcaggggttgggatgtggagtgttggagggtgaaggcatgactgatgtcccacgctcatatctctctgggcctgcatacctcgcatagttcatgctattctgagctattttacttttctcaacatttagatatttgactatagaaatgcttataaatataatttatacacatataaatggcatgtttgttatttatttagtttgagctggagacttgctctgtcacccaggctggagtaggagtacagtggcacaaatcttggctcactgcaacctctgcctcccaggttcaagcaattctcctgcctcagcctcctgagtagctgggattttaggcgaccaccgccacacctagctaatttttgtatttttagtaaatatggggtctcaccacgttggccgggctggtttagtctcaagctcctgccctcaagtgatccaccaacctcagcctccaaaagtgctggaattacaggcatcagctaccacacccagccataatgtcatatttattaccttaattatgatatttataattttcaaatgcagtcttttaaagcaaaatcaagagatattcaaggacctttgaaaatgcaaaacaattatttatatttttaatgtgccttagaaatagctcaatttacactgtcgaaaatttgcatatataatttagtaaggaataattccacagtactcagtaggacctattaggtttcactagaataatttatattagtaagtcacaaattaatgcttatggacttttcaaaagtttatgtgtttcaagagaaagctaactttgcaaaaagggtttatgaaatcatctaattaattcatacattataaaaaccacattaacaatctctcaattttctttcctccttttgtatagacaattaatatagaacattttaaaatagactatttgaatattgaaaatccaattacaggtaaagtaggtggagtaatttgaaattgcattctaatacttataataaataatttgttttcagatcataaattgcttactataaagcttttctaacacttataaaatttatggcaacttgagtatttgactcatcatgtcacttttcaggattgtctttctttttcaggaatattaggtgttctttgttttaacttttaagttcaggagtacaagtgcaactttgttacataggtaaacttgtgtcttggaggcctgttgtatagattatttcatcacctaaatattaagcctagtacccattagttattatttctgatcctcttcctcctcccaccctcagccttctgataggccctagtgtgtattgttccctttatgtgcccatgtgttcccatcatttagcttccacttacaagtgagaacagaggcagtgtttggttttctgttcttgtattagtttgctaaggattatggcctctagctccatccatatccatgcaaaggacatgatcttgtttcttttttttttttttttttttggagacagagtctcacattgtcctgttgccaaggctggagtgcagtggctcgatctcggctcactgcaacttccacctcccaggttcaagcaattctcctgcctcagcctcctgagtggctgggattacaggcgcccgccaacacgcccagctaattttttgtatttttagtagagatggggtttcactatgttggccaggctggtctcgaacgcctgacctcatgatccgcctgccttggcctcccaaagtgctaggattacaggcgtgagccaccgtgcccggctgatcttgtttctttctctcccttccttcctcctttcctttctctgtcttcattctgcatttatctttccctcttttctctgttaatctctttcccttcgtttcttctttcttttctcttttgcctgtattcccaattatagcggtaacattacttgacttcaattgatgggacttttacagtttaaatctttatacttatttatattccaaattaattataagacattcttttttttaagacattctaaactactttttgccttgaaatgtcagtaagaataatatctaagaaatgtgtcctattttagtcatataaaacaaatgtatcaatttacatttatattttcatttaaaaatacatatgtagaacatgttatgtgtcagaaaccatccttagaagcacttctaaaatgtagcggatttaattgtcatcattaaattattaaataagcataccttattcatttcagttaggtattattattatgaccactttatacatgaggacttaaggctcaatgaattaggtgattttgtcaagggcagttcgtttgtgagcaatagaatcaagattcaaacctagacttttggattatgtaaccacatgttatgtgtggagggaaatttaaaaaacaaaacaaaaactccagacaccaaaaagcaaacaaaacccctaaacaaaagctaaaagctgaattctgttctttagactatgtctaaatattatctgtcagtttttacacctcttttttcttaacagatgactggagggagtgttgtattatagtataatggaaaaccttcataaccttgattacagcagctgaagaactcttgagagagaaaaaaggaagatagagttttgcctcattctctccttatttagtgttctcagaagtcattcttaatcttttacctcaattatccttagttcatttatgaaaaaatacaaaccattcaaaccctctgtcatatcatagcgtatgtgtgacttgactttatgagtgaaggctttctgtacgtgtgttctgaaataaaagcttaatgaaaacatctatttccttttctgcagtgtgcagatgataataacgaagcatgtggcaatgctacagcagttatagtcacatggatccgggacatactagaaagaaacatgtcactgatccatgggcctgtaagtgacacaagcaaaggcattcttacataggttcactgcatctattatttatctgatagaacatgtgtgaaggtgttacaagagtgctggacttaatatggattactgtggaacttcctatcaaagctgatgagatgaatactaaaaaaaggttaatcaaagtttgacactggcccttacagaagccagagctactaatttccaaatgctacaacttttgaatactctaaaataatcctagtggcagtgtcaacagagtgctatgggaaaagaaagtgcggaggatcagtgttggcttaggggcctcagaaagcgtcacagaaaaaatgattgtttattgcagagaaaggagagaaatcaaacagggtgcaacaagtgctaagtcatggcttgtccagaatactttagaacttcctgtatagttgagtcttgccttttgggagacaggaggggttgggaaagctaggattacaaataaaattggtgatattcagattatagttgctttgagaatatgcagttatttgggggtgtttagaaatggtgttattcatggacacatagagggaaacaagacacacagggtcctgtgggtggggggtggagggtggagggtggcagggtggcggggggagagggtagagggtggaaggtggcagggagaagggtggggagtgggagggtgggaggggtgggagggtggtgggggagggagatgggagggtggggggaggtggagagtgaaagggtggtgggggatgggagggggtgggaaaggggagagtgggagggtggagattgggagaaaagagaggaatgggaaaaataactaaaagtaattgggtactaggcttaatacctggatgatgatataatctgtacaacaaacctccatggcacaagtttacctatgtaagaaacctgtacccctgaacataaaataaaggtttgaaagattaagtgccttgctaaaagttagagaatatgttaatgtgttatattcagaaagtaagagcttctaatgctttctactcccttccccacaataattatgctagttttctattcatcatctctatctaagtattccacatagtatttcaggttaatgaatatttttatatctcctatttccagataaaaccatataaagttctctcaggtcagacgcacagaaacacatgtataagctacatcatcatatatcatcactttggtgttttaagtcatagaaccattgctcactgtagaacaagacagcaaaaatgatgctttatgaaaacagaaagtaaatttcacatctatcattcatcttataaattctttgtatcaaaattttaattaattagagtgacctagtttcctcactgtggaagaacaatatatgtatatacgtatgtatatgtatatatatatatttttaatgtaagtactctctcatccaggaaatgttccctgttgagtgataagcctagtgtgagaacataacgttcagccagcaaaggttatattacattaatctttgtacactgctcaatagttaagaggtttggaaccgtttatagtaaggaccatgctatcaggttttatcagtggcttattacataggtgacaatcaaaacattattgccaaacttcatgttagttcacagatttaatatctaatatacattttacagttatttgaggcaagttaccttcatttctgggttgcacacgtatcactgggagaaaatgcaaagtacataccagagaagaggtgagttccctttttcaagcagtgcaaaccacagaaaaacatcaagcaaaagatctaatgtaactctgttgtgaaaagagttgtacaagttgtactagtaactaaaatacacctagaagaaaaaagatttttggtcaacagacatttcagggcaaagatatttgcattgctaagcagaaatacattatgcataatcggttaatagataaggaagaaaaattcaatattaaagaccttcttttgtacccaatgtattataatctgagctagatgtgttccatgcactggattgtttcatcctggtagtaatttataggtgggcattatcgtctcagttattatgaatacatactactgacatggcagaactgctattctgtcaccctcacattaatctctctctacttcctgtgtttgtatacatatataacattgtatataaagtctttttcttttttttgagacagagtctctctctgacactgaggctggagtgcagtggcaggatctcagctcactgcaacccccgcctcccaggttcaaatgattctcttgcctcagctttgccagtagctgggattacaggcacctgccaccatgccagctgatttttgtatttttaatacagatggggttacaccatgttggccaggctggtctcaacctcctgacctcaggtgatatgcctgcctcggtctcccaaagtgctgggattacaggcatgagccaccatgcacggccaagtcgttacctaaaatatttcagtgatttggcggggagtgggaatccttgttgcttaatattttcctcaataaaagtgtcaaatggttaatctctttatagattatcttccttttgatatttataataattatatttgaaactctcagaagaccagatgaactcaaactacagtgccacaagagacattggaaattctgtgtgtcataccggacattaattatatttcaaataacaggaattcctttaaacaggctgaaacaataaacatacaaagagtttactcagcatttattgtgtgttgtgcatttgtatgtttgttcaatgagtcacttaccccataggagaagtttagtcacaggatttttcagaaagcctaagagggtcatgaatgaaaatatcctcctattaagatattaagcctatcacatgtggcatataagtgatgtgaaattcatgctcttaagtgatgtatttcaaaggacagcctgtttcaaggtatggtaaaatgatatatgtacaaatattgccctgtgggtgtgtagaactgaggctcttaatgacactttgacgatttgtgagactcttgccatcctgtaaatagtcatagcagctacacctttcactggaaacagggaattttcccaagatctgtctctcaccttctggttcaaaaattcttgctctcctttgacaagcccgtctcttgggttacggctctctctctagcaaatcctccagaggataacaggagagtctgtgcactgactttcagaggttcccttgatccattgcttttgagctgaatctaatgccatagtgcagaaccttacactggacctgttgccccatgattttgattcccagaagtggagatgttggctaccataccatattccaaaatataagatgagttcacaaaccagctgaagaactcacgaggaagtgtcagggcaaaggcaactttaagaactgctgttttcgatgagctaagtgagaataaaacaaaaattcccctatttatgtatcaatagctatgcactgacagtttttacaagtgtaattatacacaagcaaatggaggtaaaaaatcaaaatatcctccagaaccagatattcttgaatttaaagacttatttgactactctaaatctctgaaaacacttctagtattcaaaaatgtggcataacttatgtgggccaactaaactagaaaatggtgagttttaatatttatatgatgacaagatcaccatgacagaatagaatgttcccaaaacagcttcgagcaataatagatccagcgcaaaaaaaaaaaaaaaaaaaagctggaggatttagctctgccagttattgactatgtgacctggtgcaattactattattacctatttgacattttcaaatcacatgacttacttcacaagtaagaacaccaatgtccctaccgaggtttgttttcaaagaatcaggaaacccaactccagaaagtgctattcatactgttttcatgaatggtgctccgtgaccttgataacatatgtccctagagctgtaagccatggatttggctttcagatggtgtcaattaaataatgtaagctaaagagccacagattttaaaatgttacataaatcttactgagaaagtgattaaaaataatcatcttcaagctcacaccaaatgacagttaatacagagtattttagtcctcataaataataaaaacaagaatgatgcacaggtaccattattttcaacattgttctaaagatgaagaaattaaggtatagggattacacatctagatagtggaggagtgaattttgaaacccaaacgagttgacataaaagaatgacaaccttttaactgccaagctgtatccactatcatgccgatttcaaaggatagcatggtattgtgccgctttattttttgtaaaagaaccaacaatacatgcaacttgaaacattcctatagatagatgattttatgattgccagggtgtttgagatgacacacaaacaacatgcatctcagattactgaatagaacagagaattgcatggacatatatgaacattatgtatcattagggttttggttcatctttcaagtcaagctggtacaggctggttgacatttcctggtaaaagggtgggagaaccaaaaaaatacatcctttctcagatatgacttttgtgactatcttgagaagaagaatccatgcccgatttatctctgcatttctgttttcacacagaacaaataagtgctgaataaagtttatttgaatgaaaaacaagcctacgtagtaataacaatgtggaaaggagtaattattctgtcctgaggtgcaaaagatggtttaaaaaggtttctaggtgaattagaaaaaaaaaatgcttttgacatctaagacatgtgtatatccattttccttactgatatattttctattaaacttagaaataattatctgcctaatggaaagaactgtttataattgatgtatgtgaaaatgagctgaaagaggaaaacattcagtctatatctctacagttatgtgttcaatggtagtattgatactagcaaatgtatttggttcttctactttgtttaatctatttaataacacttagtgtaatattgaccttgggattcagaaaaaaatattccaggtgaggcatgatggctcacacctgtaatcccagcactttgggaggctgacactggaggatctgttgagttcaggagtttaagatcatcctgggcaacatactgagacactgtctttacaaaataattttttaaaaaattacccaggagtggtggcatgtacctgtattaccttgggaagctgaggcaggaagatcccttgaacccaggaggtgaaggctgttgtgagctgtgattgcacactgcactccagcctgagtgacagagtgagaccctgtctcaagggaaaaaaaaaatcaaacaatttttgaagtcagaatagagtagcagtgcgattgtacgtagcctgtatgtgttgcgtgtgcagaatgcaacatatttccatggctacttccgaaatttcaatcatcctcttccagaatttccttctccagttaccaacaaatatttattagggaataaatatgtgctagccactgagatacaaatacagacttatgtactcctctcctagggactgtattctaccatggaactagatcttctgtaagatcgaggcacagatcatcggcaagtctaaaaggaaattaaaagataatttttaaggagttctaattttccttcattgttgatgacttttcacagtattacttccttgttggtatatgagaacaaaatgctggcttgtcacatggttcttagaaagactgtctagtcataagaaacattacttgacttacttaattctctggcagttttataatggcatatacaatttctatacactactttaaaatggagtcaatgtaattttcagcaaagctttggaacagattcagccaatgtttgtcgtaacatagggatgcatgctggaaatggttctctctgcttctgtggctgggtgctcctggagccaatgctatactgcaaaaatgaagcactatgttgatgatatttctttaatcaattattctgccaataaggtgcgttagtttatatgcctaactagcattcttcttctgagcgaggtgcatgaggtacctgagagatcactattattgtgtcattgaatcatagttctattattttcagagaaaattttcatttctcaacggttaaatgtctctacaattcagtatgtctcatgcctagctctctaaagccacagaacttatcaaaactagtcttaatatctgtaaatactgactgttggttaaaagtctaggccctgtggttaaactgcctggaatgaaatcttggcttagatactaactaaatatgtgatcttgagcaacataatttctctctgactgagtttcctaatacacagaaagagaaaagtcacaccagctatatagggtcattgtgaggtttaaatgagatagtacatggacaaaaatgtcttgccaaagtaagcacgtaacggatattagctacagtcctcatcattgtctgtgcccctttttgtcgtgtatcaccatagaaaagaagggaacgactcgacttaaaagttttctggtagttcttatctaaatgatgcaaatagatgaatttttaatacatggatgtggatttgtgatatttttaggcttttgtgtttgcacagataattatggctttttaaagaatcaagttatcagatcatttcattttcagatattaaaaaataatgaaaatggaaaagtacattgaaaatgtgatcattgagggaatatatttagcaataaggagatgacaatgcaaccaggaggggcgaagagagagacagagatataaatgagcaaaactttctttgcttttgcaagatctgttgtttataggataagcccagttgttttgcagtctagcactgatgctttccatgggaagagcacaggctgtgtatgtgcatgtgtgtgtgagttcaagtggttttacattactaatgaaacacagacttttcccaagataatcaactggggattataatttacagcaaagaaggtgtaggtgcagaaacttaatttctgtggctaaaaacagctggaagtaaagatgtcgctgaaaagacattgttggtccctaagctagtattgaccccacatggagagggaatcccacagcattaaataggcgtctgtagacacaaactgccatgaagtgattcatttataaggaaggtactaattttaaataatactcaaatcattgttaatttctgtactatttaatagtattaatcagagtgaactcatctgatacagcaataatcataagaactgttctataagtttcatttcaaattctgcaataatcattgtgtcatcatgttatcacatactgttatgcgcatccatgtgaagcgaccaccacacaggctttgtgtgagcaataaagctttttaatcacctgggtgcaggccaactgactctgaaaaaggagtcagcaaagggagataggggtggggcagttttatagaatttgggtaggtagtagaaaattattacagttaaagggggttgttctcttgtgggcaggggcaggggtcacaaggtgctcctgagattcattgtccaggagaaggagtgtcacaaggtaaattgatcagttgaggtgggacacgagcaaatcacaatggtggaatgtcatcagttaagacaggaactggctatttttcacttttgtcgttcttcagttgcttcaggccatctggatgtatacgtgcaggtcacgggatatgatggcttagcttgggctcagaggcctgacacataccaattggagaatgttgccatgaaatgacataaaaacaaagactattaatgactatcctaattatactaggaagtaaatcaaaactcttcatcagttagctaccattcttgttagctgattacagcatgcatgtaaaaaatgtctggtaaaaattatagtatgtaaaactaagatatttagctatgaaaactttctatgttcatcttttattatacagcttacatgatgcttcaaaaaataattataaatgttggcatttttaaaacactttttcacgaatgtatttgaaaagtctcttcatatcagaatttaggaggcatacacatatgctgttatatacagttatatatactttactaaaaattgtttccttttgacttgccctctgatgagtaacatttcacaaggttactcgggtaaccttgagtaaattactccatttggctaatccttagtttcttctctatgagtggtgatcaaaatgcctaccctgtcttttgaaagccaaattaagataggggttatcaagcagtgaattgccataaaatgtattatgcatattttatcacatttgtattgttattataaatatgtgtttatatgtatatcctccttagtgaccatgagatcatccagggtaggagctctctggaaatttagaaaacaaaggaaaaaaaaaattgaggaagtggaaaatacaaaggaattttctcagtggtgtttgttctataagctctaaacagtaggccaccaacgtccttgagaatctttcatttatctgtctgtacctcataattatatctgtcactctcgttttattatcagaagatttgcacagttcattttaaagtctaacttgtcctttgtgctgactgccacgcatgtctgatgaaatataacaaattgaacagaggtgccattattaaagcaatctgataaaaagctgcagttgtgaggtacactgaagaatatatttggtttcttcagggaatcaaaagcatttcacatttaagttattttctggaaacttttatgtgaatatactacattttatcatgcagaaatactgtgtatcttttctttcttttgtaaaagagagcaaacaggatggatatatcaatgagttactactaaggtttcagtttttctcatatgacagaccccctgtaggaagaggaatggtgtttccatcaaaatttgattatttttatattaatatttttattaatttttttcaaatttatatatatctatttaaatcttaagataattttgcaaatagccacacacacaatttttctaaatttgatgagtcttccatttcacataattacaggaaattttctcttcatgtgattcctatctgcaagaattccatttactggaatcgatttaaataataccagtcttccaacaacagttcaatttcaatccacagcgtactaaccataattgcataaattacaaactttgctgctaggccttcagtccacaattcactacataaagaggagacatacgtcatgatcagtaaccaatcatgacacttctttcaaagtctccagtgattggtcactgcacatgtataatttgtataattcagtttatgcagagacagggacttcattcccctgtgttctgaccagttggagctcccaaaatgcctgtggctacagtttgctcacagtggtcacaagtctattgaaacatgaatcttattaataggtttttgtttctccagattaaagtcacaattaccaaagatttaaataaatgttttgtatatgtgaaaactctttaatggcctcatttgcaagttgttttatgcgtatgatagctagaatctgctctcgaccagtagaaggtagtagcatttgccagaaattttgtaatggttcacagacaattctatgcaaacaaggtaatatttcctatgtttttatgtataaattatttaggaaaggggaaaatacatcatgataatttttgaaagaaaaaagcctttaaaatttttctgtttctctttttctaatttctaatacagtttattttgagtgaaaaggaggaaagggaacttaatttgtgaagcaactgtttcattttgtcagtcctctgggctaaaaatatatagaatgattggaaagaacatgaaaaactgtcatctggaacagttcctaaagtgaatgtgcagtcacacctttactattctctgattatgctgtgattctggaaaataaacaaggtgtgcatttctcattgaaatatgtcttggaatcttctccaaattaatacctgcatgttatatgatgcatatccatatgtgtacctatagctgtttatgtgcaaatgataactactttaaccaaacaatttccgccattttcttaatatttccattgggtaatcaccttctttaggaaaatgctgagtcataatgataaatataaagccactaatttggatctgtttcttttctctaagcaatatgttcaatgagaaaaacatgtaaagatgctcctcgatttacaatggagtcacaactcaataaacccattgtatgttgaaagcaatgtaagttgaaaatgcgtttaatacctagcatgcatcacagcttagccaagcttactgtaaacattctcagaacacttacattagtctacagttgagcaaaattatctaacacaagttctattatataataaagcattgagtagctcaggtaattcattgaacactgtactaaaagtaaaacgcagagttgtatgggcactcaaagtatgattctactcaatactcatttgcttttgcaccatcataaagctgaaaatttgtaaggcaaataatcgtaagtcagggagggtttgtagtttcctttttaacaaaatggcagaggattctttatgtgtttccaatgtttctttactgaatgttagagccaggttcgtaattctacccatactaccaaccccgaaactctcctcccccttttgcattcactctcatctcaaatctctatgtcttgcaatggtcaagttggcatgaattaaattgtttaacctgtaaattcaacagtgttcagagatgtataaaatgggcaaattcagtgactactttgaacaatggaaacatggcttttcaatggtaacgtcttggattggattcaaatcaggcccctaaaaatttaaggtcctaaaacccattacgaatgttctgagacatccaatgatgcacaagggtccttctagaactgctagctttaaaatgtgtaaaattggtcagagatgacagtctaactagcaaaaaaggaatgtgtctttcaggttcctggaaataatgggcacatttatgtttttcatctctagttactgtcatctctgcagtcttacgtagtcttctacatttccttttgtcttgtaaaaatgcttttctgttagagtttatgctttcatacaataaacatttacatagagacctgtcacagtggtgagcatgtaaaatgcatttaggaaatgccgtttgatgttgtatttgaattgacattttccctacataaaaacctttaaaacttataccagtaaaggccaactttttaaaaggtagtctccttttatgcatactaagagttatcctgttggaaactgcataagcatctaatcagtgcttgctaattgtgggtgctttcagccagagcatgaaattgggcacacaattagcaaactgaagaaatgtttaattgcaagtgcaattttaacctattgtcaagagggaaaatagaaaggatgaaaatgaccattttgattgtggttaacaaagaattaaaatagataaagagtttggacccttgaggagcaaatctcagttccaatatttatttgtctaactttggacaatcccttgatcactgtaagcatcagtttttgttgttttttcatgtgtaaatggggatcataatgttttaattgcaaagtttctgtagctatctgagatagaagcttgaaaccacctaacatggtgtaaattatgtatgtgatagccactcaggaagtgattgctattatgactattattttgaatattaatactactgatgctacaataaagcaaaccaaaatgtcatccattttttccctgcagttcgtcagccaccatggtatgaaactgccatgaaatacactatccattatgctcttaagtattccttaccttgaactatagtatacggtaaaagggcactggacttgagatgaaggaagtgagttttaattctgattgtgtcatttacttgagtaatcttgaagaaatcacttgatatctctgaaattcaggcttgttagctataaaatggagacgatacctacttcaaaagatccaagagagaatagtaacaaagatagcattgtgcttgacatattagctgtgtaataatcttccattaagtttaataaaatggctctgcatatagtgagtgcttctagaaatttatgctaagaattaagtttattttcactttcatgtattttcttatgctgatgttatgaattagatgtcttattttttgacattatgtaccaaaaaaaaatctgcaagcagaaacaaataatttattcaatcaaaattttataactccattaactttgtttcttcttactctctatatgtgttttgaggttttttctttgattttcttattgtacatgtgttgttattattgaaaatttttgagacattaatagtaaaataagctaggctccaggatacttagaatagggaaaaatattataagatataagtttaattcttattctgccagaatattataccttgacaagtaatctcccctccctgggttctgtttcctcatctattaaattgcaatgttactgacattagtatttttatcagtgccaaatgaaatactgagcaacaaagtatattttaagattgaaaagcagtgtaattattgatttttattttaagttctggggtacatgtacaggatgtgcaggtttgttgcgtatgtaaacgtgtgccatggtggtttgtagcacctatcaacccaacacctaggtattaagcatagcatgcattagctatttttcctaatgctctccctccccatgaccccatcccccgaccagccccagtgtgtgttgttcccctccctgtgcccatgcgttttcattgttcagctcctaattttaagtgagaacaaaaaagcagtgtaattattttaaaattccagattaaaaaaaatcatttcacataaagtatgaatatttgcttcctggttttatgaagctaaaaataatatttttgttcagagaaaaatcatacattgtttaagaatataattggaaaataagaaaggtaagtgatgaactgagagaagcaaggaatataattaaaactcagcatctagagagctaaggaagagagctgctgttgtaaagaatagacaaagggctaaatagaaaataatttggggttatgtgtaaacaatacttttcattttgtgaaaggtgtaagttccatttatagatttacacttttccacgtggatatccacttgttccagcatcatttgttgaaaagactactttttccattgacttgcctttgctcctttgtcaaagaactattgattatatttgtgtgggtctatttctggactgtctattctgttacattgatgtatttgcctattctttcaatgatgctacccagtcttgatcactatggcctaatataaggtcttgaaattgggtagggtaggtcctctttctcatccttcagtattgtttggccatgctgggtcttttgcctttccagataaactttagaatcagtgtgtcaatatttacaaaataatttactggaattttcgttgagattgcattcagtctatagattaatttgggaagaattcaggttttaacaatattgagtctttctattcatgatcatatctttacatttattcaaatcatctttgatttaatgtagttaacattttgcaacttttctcatgtagatcttatacatattttgtcggccttatatctaagtgtttgataatttttgtgctaatgtgaatgattttatatttttaattttaaattctgagtgttcattgctggtatataggaaaacaacttttgcacattaaccttgaatcctacaacattactataattagttaattgttcctggaacttctttgttgattctttggaattttctacataggtaatcatgacatttgcatactaaggtagttttaattctttctccccagcctgtataaattgatttccttttctaattgcataagctagtactttcatgacaatgttgaataggagtggtgagaccagacacccttgtcttgttctctctcttagggggaaagcatccagtttcacactgtttgctatgatattaactacaaaaactacgtttttgtagatatctattatcaagtagaagttgttcccctttatgcctaatttgttcagagtttttatgagaaatgtgtgttggattttgtcaaatgccttttcagcattatagatatgattgtatgatatttcttccttagcctattgtgataaattacattgatttttaaattacattgatttttaaattaattaattattttttttgagacagggtctcactctgtcacccaggctggaatgcagtggcatggccacagctcactgcagcctctacctccctggctcaggtgattctcccacctcagcctcccatgcagaactataggcccacactaccatgcccaactatttgtttttgattgtttttcatattttttttgtagagaaggggtttcctcgtgttgcctagtctggtcttgaactcatgagctcaagcaattcacctgcctcagcctcccaaagtgctaagattacaggcgtgaaccattatgccaggccaattaatgtttaatttacaaataagcatatatttagcatgtacaacatgatgttttaaatatgcatattttgttgaatggctaaatagctaattaacatatatattacctcacatggttatttatcaggttttgaatttgaaccaaccattgtatctggaataaagcccacttagtcatggtgtataattctttttatacattggatttgatttgctaaaattgtcttgaagatttttgcatttatgttcatgagagatattagtaattttcatttcttaacagatcttagtctggatgtggtgttggagtattgctggcctcctagaatgagttaggaagtattccctgtgtttatattttctgtaaaagtttgaaaaaaattgacttaaattcttccttgggagtttggtagattcaccagtggaaacatctgggactgatgctttctcttttgaaaagtaactaattgtcaattaaatttattaaacctattcaggttatttatttctccctgtgtgcaatttttatattgcgccttctgtggaatcagtccgtttcatctaggttatcaaatctgtaagcatgaaattgtttaaaatgcttacgcctaatttcttaatgtctatgaagtcaatgttaattactctttttcatttctgatcttagtgatttgtatgttttctctgttttctggttagcttggttagaggattaacaattttattgaacttttcaaagaacactagcttttggtttcattgatttactctactaatttcctgttttcaatttcatttctttctgccctaatttgtattatagatttgcttctgcttacttcagatttattttgctgttatttttctcactttctaaagcagaaacttttatttattttagatctttcttttctaatacatgcattcagtgctacaaatttctctctcatcactggttttgtcgcatcccacacattttgaaaagttgtattttaattttcacttcaaactatttttattttttcttcagacttcttctttgactcatgtaatccttaaaatttattgtattctgcaaatattttggaattttcagcttctttttatttttgactttgactttaatttcattctggtgtaacagtatactttaaataacttcaatagtttaaattcattaagctgtgttttgtgacctagaatgtggtatatcctggtgaatgtgccaggtaggcttaagaagaatatatattttgtgttgtcagatggtgtaattaaaaccagttaattgttggtgctgttctgattaactatgtcttatttggtgtgtgttgactctgtcaattgctaatagaggggtatcatagtcttcaaccataatagtgggtttacttatttccctttgcagttatatcagtttttatctcatgtattttgacactccattaggcacagacacaataaggattattctgtttcatcagagagttaatacctttttaaatttatttatttatttatttattttgagacagggtcttgctctgttgcccaggctggagtgctgtggcgcaatcttggctcactgcaacctctgtctcctgggctcaaacaattctccctgctcagcctcctgagtagctggaactacaggcatgtgccaccacaccgggttaatttttgtgttttttgctagagacagggcttcatcatgttggccaggctggtctcaaactcttgacctcaagtgatcttcccttctcagcctcccaaagtgcggggatcataggcgtgagccaccacgcttggcccttattttaaatgcctcataattttccttactcacaagtctgctttgtctgaaatttatatatttactctagatgtttttggttaatgttagcattgctgtatctttctccatcccttcatcttaatttatatgtgtctttatatttaaagtgaatttcttgtagccaacccatagtaggttcttgtttttaatccaccgtgataagctcttttgattggtatattcagatcattcacatttaaagtgattaatgatatatttatattaatgcctaccataatttataactgctttctagccattgtccttgtttttgtttttacattttgttttgttttacatactttcctgccttcttcagtttgaagtgcgcatttgatattttctactttctcttatctcttttttacttctattttacctgtttttagagattaccttagcgtttgcaatatacatttgcaatatacatttgcaataatccaagtccactttcaaataactctaccttacttcacaggcgtcacaggtacattaacgtattcccaattccccctatgtcatcacatgtaacattgctcattcatttctcatttatctgtaagctagaaccatccaaaatattgctgctattattaattagaacaaattttatgttgtatcctctaagaaccaaaaaaaattattttaccttcatttattttttcttaaatactctttctttatgtagatccaattttctaatctgagtcatttttttctctgagtaatttcttttaatattttttaaaagggaggcttgctaccgaaaatattacttcaagtttcatttttctgagaaagtcattatttcccttcaaagaatttcacttgatacagagttctaggctgtacttttatttgtttttatttaaatatttaaaattttataccactctcttcttgcttacatgattctatacagtgttggcttcctccaccccttcttggcttctttgaagattttcttcttgtttgattttctgcagttggaatattatgccaggaaggagatttttaactgtttatcagagagtttggcactctctgagtttcctagaactgtgatttgttgtctgtctttgaattcgaaaaagcatcagcattatttcttgggctcttccttctgttcctttctctctctctttctctctctcctccatatattatttgcgttatgcacattacacatttcgtaacactcatacatgtgtagaatgtgctcttccatatttttcatttttttactctttacattgtaatttagaaagttcctattgacatatcttcaaacacattatttccttgactgtgtccagcctactaatgaacccatccaaagcagtctttatttttatcttttttttctttctttctagcacttcctttcaattctttcttggagttctcatctctatgcctgcattacctatgtattctttcatgttgtttgtttttatcatttgaggttttaatatactcatgatagttattttaaattcccagttcaataattgcaaagtttctgctgtatctaagtaggttatgatgtttgttttgtctctttaatctgtgttctctgactttaacttgccttgtaaaatatgatgcatgagggaaaataaaacacatagtgccttagcctgaggttttatgttagtctgcccaggatttaagctgtgtctactatttgctgtagctatatgtgacagagactaaaatgtttttgtctcccctgttgttattgggttgccacagagaacttatcttaaataagatctgagacatgaaggcttttcacttgtattccctcattattatgcaggagttctgctgatgtggtgatagggtgtgagggaggataggcattctacagtctcataattaggtctcagtgttttagtgagcctgggcccctgggttgtgaccatcacaagggtttctcggctttttatccacttatgtgatacaagaaggctagagggagctggggttaggtatttctcttctttaagattaattcagctctggtaaaacctcagtccattgggctgtagtaaactagttttctttgagggtaggcctttgttaagaacaggatttctaggctgggcatgttgacccatgcctgtaatcccagcactttgggaggccgaggtgggaggatcatctgaaatcaggaattcgagaccagcctggccaacacagcgaaaccccgtctctactaaaaatacaaaaattagctgggtgtgatgatacatattcataatttcagcgactcggaaggctgaggcacaagaatctcttgaacctgggaagcggaggctgcagtgagcagagattgtgccactacactccagcctcagtgacagagtgagactttgtctcaagaaaaaagaaaaagaaggaaatattcagggggtatttcacaatctgggctttcccctttccctgataaaagaacaaggggatttttctcccacctttaactgaagaacttggtagacctcttggatgtaaaatgaataagagtgtagccccttccaagactggacctcaaagggttttcatccctcaaactagtcaacacccggtgtccagtcattagtcaattatcccttcagttttctggttgttggatctagtgttgacttcttttggtgtgctgtgactcattctgtgtgttcacctgtccttctggttttcaaagggggcagtggtttgccctgtgatcctgattatctgaaggatctaagaaaaattactaattttcagtttagtcagcatttttcttattgtgaggaccagagtgatgatttctaaactctttaaaagtcagataagactaatcttgttttttaaattaaaaaaataagtatgtagtaactagataacttcagtaatctgaaagtctgaccttcaggaagctcaattatacctaaaggcattgtacatgtatgtttataaaaactacctgtgacaatgaaaaagtaggctctaggcagtgaaaatatactgtgtgggggcattcaaaggaagttatatcagaataagaaatcaaaaatatttgcatctttgtattattttactatgtatttgattatgccagtatgtttctagagaagagaagagaaacaataaaatcccagtcattgtttatttcaaaatgtccttagttagctctgcgtgcaggcaggccaccataaatgtgcatccacaaatccaagtccacggtccagggggagtttcctgtaacacaatgcaaaactgagatataatccatcaaatactgcagactcaatatatatttgcaagccaacaaaggataagaatcccaaggtcctctgagtaaaagttgaaagagcacataaaattatgctagccttaggaaagaaattggagaacaggacaaatgtttaggttctatttaatattatttgcctgaataatatggagtcaaggctctgaaaaaaaaaagtagatcaaacaaggatgatttttccaagtgattttatcaccattttttcctttagtagaaaaaataaataaaaccaactgcttatctgttggcgggaaagatatttttcagttaaacaattgcacaaggccgatgttctgctggcctgcttcagtaaggctctaaacattattaaaatatttcttttcagcttgttggtaaagccactgcccttagacctccagatgcccctcatcatgaaacccttcccgagagtcttagagcacctggcctttgtgcaacacggtggatagtatttgcagtagcagaggtccagcagaatcctattagcatgtttgttctgggccaatgcccatactctactggttgctaaatatttggaatagcatcctttaaatcatgaacaaagcaaactatgatgtctggttgtattttaaaaatatatattcttccagtctttcaaaattactttttgatgtaacttatagacaggggtattatttagagtttaatacttgatagaggagatatcatcaataatttcaatcctacaggcatttaaatacaaagttatatcattcaatgtgattgttaaatttttgtatatacacacacacacacacatagaattgtatctgaagaattaatagtatgacatctactttgacatcatccttgaaaatatattatactctgatattgagaaatttgcagattttgaagtaagcccttctcaaaatattcttaccaagaagtctttcagcataaaagagacagtctttcatattcaatcaatacacaatgcaataaacttctgtggacaaaacataggctatgcttgtgattcaattagaaaagtaatatttctgttgaattttgtgtcaaaacaaaaggaagttacaacaatgaggaaggagaggggtgtgcttcgctggagagtgaaataattaattttgaagacatgcagctatattgtactttatttgaaagcaagcaaatgcaaatctttttcttcatcattgtgagaaaagaacagatgtttctatttgacatcaaatattttttcctgaaagcaagtcttagggacagcactaaagttggtatccatttaatcctacatctatgtacttaactatagctgaagcactgtataaaataggtgaacagaaattagaaaaaattaagtagttttattctattaaacgggtatagaattgtgaaattctttagaaaagcattctatagaaaaaaattaagtattctattaaaagggcagagaattgtgaaattatttagaaaagcgttctatagaaaaaattaagtatttttattctattaaaagggcagagaattgtgaaatactttagaaaagcattctatctagaaatgtttttaaatactctgagtcagagctgtctaatcgaacattttgtgatggtggaaatggtctgtgcctgcattgttgagtacagttgccattagccacatgtggccagtgaggactagaaatgtggccaatgtaagatataacctgattttttaaatttcattcatttttaattatcttaaattgaggtttcagtagccatgtgtgcctaatatactttattagatggcacagcccaaaatatttaaacttcaattatctggaaactcatttaggtggaatgtctcaattctgaatgattattaatagtggcataatttctgtatttgtgtttttaatcaaaaattaatgttgtgtgctttcagatgcttgctctaacgacctttaacatgttaaagatcatatataaacaatactgaaaactgcaaaattaagacaagttcatttccaaccaaatcatatatgcattgacaacaatggtagcaaacatcaggaaagctttgttgttgatcttatatgcatattgagagtttctctttttacgtgagacaaatccccaagggatccttaaaaacaaatatttttttcttctcacaaagcaagttatccttccaataaattcttaacccattaaagttacaaaagaaaaagccaagtcagcagatgtatctatgcttgtaaggtattcttgacctattgtgtactcacattcaatcaactagtaggagctttggtaacactattattttcagctctactgacaaatcagtatcctaaactgaaataaaccatgtggtctcagcatggtgaaatagctacaatagccatttctctggaggggtctctatgagggttggtcaagtgtatgtctcatgatatgacttttctatttggtaatgtgtacgaaaaaatgcagaaatcaaactgtggaaaatatttttagagataaataactctgtcatgcttaatgttgaacaaaatcaaacatcagaatattaattagtctccaaactcattttttaagtattttttctagcatttactttatgtcttagtctgtttgggctgctataacaacatatcataaactgggtggcttataaacaacaaacgtgtttctcatggttctggaggccaggaagtccaagatcaaggtttaagcagatctggggcctggtgagggcttgttccctataagaagcaatttcttgccatgttctcatgtggtagaagaggaaaacgagctccctcaggtctcttttataagggcactaatcccattcatgaaggttccgttctcatgacctgatcacctcccaaaggtcccaccttttaataacatcacattggggattaggcttcaacctgtgcattctgcaggggacacaaacttttgaaccatagcacttcattcctgaaatttgttccatttgtctttccatttctctctcccttctttgttccaagtcttctttattttaatttttttctctgacaaactcctttcatctgtgctttctcttatttcctcttcaaatattttaagtgggagacttttataggtcatatgtctactttgattgttacctgtgttgtatttttaaatagactctgaacaaattaatataaaaaatgcagctctaagagaaaagaacaaaatgtcaaatagtaaatacattttgtaaattgcaatcatggagagacaaccttttttgcattgacacacatggtcagttttcaagtatgtcattgccactcattgtaaaaattacttaatgatgccacacagcacacagtctccagtatgctacatgcgttataagctcagcctcattgcccagtcccagcaattttactaaattatagtctagtagtgagatacagagaaggagaataagagaaagttttagttagtatgacctggaagccagaacagacaaaatagatactaatttgttacataagtctatagaatttttgcagttagaggcaatcttagaaaccatcattagacagatgaagctaatctaaagatgggccaagtgactcacgcgaagtcaggaaatagttaatggcaaagtttgactacttaaatttcaggtcctgtgtctatgttcccatcacactcttacaaatgatatacacttaaatgtaatctgggccctatgtttgccaataagattagaaaatactcactagcctaatgtgaggtcaattggttaaccaaatagtttaggaaacactagcctcatagaagggtaaatattctccatatcctacataggtcaggttggcttaaaaactgaacacgtgaaaaaattctaattctatattaggatgttaggataaaaatagtctcaaacctcatctagtcatcttcttctattgactatatctgcattgtgggcaagacccaagcatacctatgggctctaaaaatggtggttagaggacatcacctaaattttctttcctgtcaactttccttgaagagaatatttcttttagctagatggtcagatccctgaaatttctggcacatcaaatgatgacagtgtctctcagctgagagaagcggcctctttgctaaaaggatttgactacctgtttgggaggcacccttgtcccctaggtcatttaatgattttcagatgctcagacaaatatttcccttgctaatgccgtgatgagagcttttggctaaaaagtgtttaggatgagatgttgaccagtgcctcagtatattaacttgcatcatcagtttgaatagggcagactcttagtccttccaggctgtgatcacaaaacccgtaaactgggtggcttataaacaacgaatatgtatttctcacaatcctgataggtgagaagtccaagatcaagatgcaggaagattcagtgtggtaagtatttgtttcctggttcatagatggtaacttttttctgtgttctcgcatggtggggagggcaagacagctctctggggtatcttttaaaaaggcactaatgacactgatgagaagtctctacccttatgacctatcaccccgcaaaatgctccacctcctaatacaatcttcttggtacaacgtattagtctgttctcacgctgctaataaaaatatacctgagactggataatttataacgaaaagaggcttaatggactcacagtccacatggctgggagacctcacaatcatggcggaagacaaaggaagagcaaagagacgtcttacatggtggcaggcaagagagctgtgcaggggaactcctatttataaaaccatcagatctcatgagacttatttaccaccatgaggaaagtatgggggaagctgccctaatgattcaattatctccacctggcctcgcacttgacacatagggattattacaattcaaggtgatatttgggtggggacacagccaagctatatcatatggtatccaactcattcttaggattaggattttaggttaggatttccacgtatgcattttgaagagacacaaacattcaaaccatagcagacagagtttctcaagagataccttatggacatcttgggccaaataactttgttgtggtggatgtcttgtgcattgtaggaagattgcccacatgcgtggactctagatgccagtaacacccctaccagtcatgacaataaaaaatgtctccagacatagccaaatgttccctgagagtcagaatctttctagttgggaaccactgtggtagggaaatggagatgaagtaacctttttctctaccattgtgtttcgtgtgttctcatggattctcattggttctagcgatatttgagcaaactgaacagaaatgggtcccaccctcagcaactttatagcccaatgagacagttaggcattaagaaagtaagtgaatataattctagattgtgataagaaaatgctatgaagaaaaattaaaaaagaaagagattcatggagatcttctcagcctggatagccagggaagagctatctgtcaaagtgttacaatctgaataatgaatgtgatttatctaaatgaatagtataccatgctaataaattattccaagtgaacaggcggccgctgaatgtccaaagtttggatgtttaatactctgcagccataaaaaaggatgagattatatcctttgcagggacatagatggacctggaggccattatccttagcaaactaacacagaaacagaaaaccaaataccgcatgttctcacttataagtgggagctcaatgatgagaacacatggacacataaaggggaacaacacctactgggtcctttcagagagtggacggtgggagcagggagaggatcaggaaaaataactaataggtactaggtttaatacctgggcaatgaaatctgtacaacaatccccatgacacaagtttacctatgtaaaaaacctgcacatgtacccctgaacttaaaagttaaaaaaaaaaaaaaaaagattcaaaggcactggactctactatttgaagtacagacttgcaaaaattctacattagtgcttggcaatagcccagcaaaatgcactttggcagtgaaaattagccacgtcgtaaaatctgcaattcgaatgtatttacattcacaacattcaatcattattctgtactatctattggggcagaggcaacacttttcatgaccattctgggtggccattgctgctttttctatcacagccatttcaagaggctgggacctgaagccccagtgtgtgcctgaagtctttggaagtgtttctaagtcaccacaatactagcacagactcccacttctattcacggccacctcttatgcctggcccagatcctcttcatttgtgatgggcatggggcctcactccattgtcttcagtataaccttcattataatacagtgccttactggaaggaggccttcaatgactacatgttgaacacattatttaacatataaaaatgatctcaacagaatcaataaggtaaccacttgttagaaatttctttctttttgttgggattttttttgtggttctctcttagaaactcttgccacagctcttcttcattcatgattctccaggcctgggctgcactccactgccagagtcaggttgaccctgtgactctgacaccatctccatctctcagaagggccttgctctttaaatttttagttcaacatgacctttgaaatggtcaagctttcctctgtctatttcctattccttatttccttttaagtctgttaataggttccatgttcaactaatggaaactctagaaaagaaagttttaagcattatacatttgtgtcattatcaaaataagaatgtgcatctgtaatccttcaaaggttaactctttggtttcagccataaaatgcaacttgagtcttgataactgatggagaagtatgtagggtaggcatagcacttttttttaatgcatggagtaggaaattcaaagcgacatttttgattatgtatgcatcagcaactgtgatttatggtacctgtttgtgtctgttacatgagtgatgggttcttacgccaaaaataaagttactatattcacacctgaggcctgagaagtaacagttcagtaaaagaagacaagactctataaaaaataccaaagaaataaatacaatgaacacttatagcctgtcttcttacctaagaacttattactttctaccttgtattattaattttgacaactgtgcttctgctcacaaacctgtaaattgctgggctctgcttgcagtgaagctactaccttcattataatacaggaccttaccggaaggaggccttcaatgatacatgtttaacaaattacttagtatatataaatgatctcaacataatcaataaggtaaccacttgttagaaatttctttctttttgttggcatttttttgtggttctctcttaggagacttttgctgaagcttaaatgctttaaaataatttttaaataattaattactacaaataaatgagctatttagcctgaaatattaaagtgctatttccagaacttatatttctgtaattaaaatgccagttttgttctctccgggctctgtttaagaaaaaaaaaaaaagtgattttttttttttttttttttttttttgagatggagtctcactgtgttgccctggctggagtgtggtggcgtgatctcatctcactgcaacctctgcctcctgggttcaagtattctcctgccccagcctcctgagtagctggaactacaagtgtgcaccaccacacatggctaatttttgtattttttgtggttttgccttgttagccaggctggtctcgaactcctgacttcaggtgatccacctgccttggcctcccaaagtgctgggattacaggcgtgaaccactgcgcctggccaaaaaaaagtgattcttaaatgcagatgccttggtcaatttatgtatgtttgagatataaattataattcagaagtatgaaggtgccaagatcactatgggaattaaatatgatattttaagagattttgagaggcttattttctatatatgaatggataaagtcaaccacagttagaaacatcatttatctgggtaacataattgtgatttcatctgtaaagtcaaatacaaggcagcattatgtggattaacatttttttccatattatagaaacagtgttaaggaggaatcttagtcaaattccatttttttaagagacaaaacaaaataaaactgtgattgagagttcaaagtccttaactcactagtagcagaactgggtcgtgtttatgaacttttctcttcactgtactcaccaccatgcattctaaccatgaaagcaattgtagttctacagcaccacaatccatgctagtgctgatacgagaaacctaaaatgaaagggaaatcatatgtaacattgtgttgattgattgaaatgtgtgactagattcagaagtacaagccagaagtttggggaaccttacttctgagaatgggccagttctgactctcagtcaagcctaaagtttgttgctcagttggaaacaaaagcatggatatgattgtccggagaaccctgttgctgaataacaaagaggcataagcagaaaggagaattcagaagcacaacataatctaaatttgatttatggcagtgtgcagtctggatgtctccagcttgtggtttcagcttctacttctcaagtagagaagctggatggtggtaaaatacagcaggctgaggagggccagactggagttgagattttctggactatgaactctgggtgtggggtgtatcttgagaggcatactggccacaaagggcggccggagggaaaaacaagttttgcatgcccatgctctgttcagagtccaagaactaacatctgtttagttttggaaacacaggctggctctgagtatggggatttagaacagcagaaaggtcaacattgtataggagagactcaatgttttcacaatcgattaggagcttagaagaattggggtggcaagactaagaagtgagctgcaaggatctgaatgaaaagggctgtcaggccaaggcccatcagcgaaggcagagaggaactggccagagaccagggcaggaagtgtggctcacaattggaaagcagtgtcagaggagtaagagatgaatgaaacatggattaggattaggattaggagctaacgggtacagaaccaggacacaaacacaaaatctaagaactaccagtcaatcctggaatatgaaaacaaatgtcatggggatcagaattttgtctcaagggaactgtagtgttgctgcttagaagtgcaactgatcccataagtggggaaaatgagacacacacagaaaagtataggacaagaggcctgactgtttcctattctcatcccttcattcttgttgacacagattttgattgaggtttgaagtttaccatcagaaccatatctttcctagaaacagagaaactacccaataagtaaaatcaactacagtatcctccttgtagttttgtcattatttctcattagttttatttcacttatttaagtagcaatgaagggataggcagtagatgacaaagttactactataggagcactctgaggcattatccttcctcaccactaatgcacttctgatttttttcctctgttctcctctcttatttagtcttttacatataatttgggttttacaggcaatgtctcacagagtcagtggccactgtgactgcttcttatcctcattagagcaatcactaatttaaaatcagtcaccatttgaaaacttttaaaattatgtcacaagactgtaggatatttcaagataaggggctagtactcctcactcatatatatccggtcttggcattgggaatcattagccaagttaggagctctccagctggcccattgcaaagcaatgcagacagagggaaagttgaggcacctgcctggttcactgggtttgattgcttactaatccttcacttaacctggaacctccttgctcaacctcttggctcaggtgctggggagaacacaggttggcaagatgcaagttctgccttgcaagcatttttctcctgtatatgcacacacacacacagacacacacacacatatatgtgtgtatatacaggagaaaatgcttgcaaggcagaatttgcacacatatgtatgtatacatacacacacatacacatatattttatatatacatatacatatatattttatatatacatataaatatataatatataatagaaaacataaacatacatatatgtatatattatatgtgtataatatatgtacatatatgtaaaatatatatgtataatatacatatatatccatgagaatgccagaaacaatatatgtataatatatactatgtaatatataatatatactatataggtatatatgttcatatttataatatatatgaacatatttattcactgcttaaatttccactgttaccatgtgcctggaacagcttagacataactatttgcttttgagtagactgaccctagaaacaccatactgtattcaaaacaactagtttctaatcatggaattaagacactaaggtggaaccatttcagactggaagtcattttgaggttcacactgaagctatttcgtatatatctcattatatatacatatcttatgtatacatatatagtatacacatcttatgtatacatatatagtatacacatcttatgtatacatatatagtatacacatcttatgtatacatatatagtatacacatcttatgtatacaatatagtatacacatcttatgtatacaatatagtatacacatcttatgtatacaatatagtatacacatcttatgtatactatatagtatacacatcttatgtatactatatagtatacacatcttatgtatactatatagtatacacatcttatgtatactatatagtatacacatcttatgtatactatatagtatacacatcttatgtatactatatagtatacacatcttatgtatactatatagtatacacatcttatgtatactatatagtatacatatcttatgtatacatatatgtatacatatcttatgtatactatatagtatacatatcttatgtatacaaatatgtatacatatcttatgtatacaaatatgtatacatatcttatgtatacaaatatgtatacatatcttatgtatacaaatatgtatacatatcttatgtatacatatatgtatacatatcttatgtatactatatagtatacatatcttatgtatactatatagtatacatatcttatgtatactatatagtatacatatcttatgtatactatatatataaataaaataaaaaacaggaaattgcttggtgccaaagcacagaagaggaagataataattttgaggtatttgaactggactttgaagaatagaaagtttttttttttccctaaagcagtgaaaacagttgaaaggccagaatgatttatttcaagtgttacctttaaaagaatattaatacttgacagtctcttcacatatatgcctgtttcttttctttcaaaaaaactaaccccatgactagaattttgatctacttttgcctttttttttcttttttagtttaagataaaataaatagtctaacatctgtaacatatcatggctgaatttggttatacacaacatgcttcattttcatatcatatcttacttgagtttaaacctgcttttcatattttactcctttctgttactcaattcaaaagtatttgccatgaatgacttcataaccatacattttagatggtctgcttgggatttttttttgccttatatttttctattggcttattttcctttattttaatatacacacattcccttaatgttgatttcttcacgctgacctgtacccctcccttaaaatttattgccagagatgaaatgcccttgataatcttcaccttaagattcactcccctctctgaattacttcatttggttttcaaaactaaaacttataagaaatctcagactcgcaggaccctaaatataacattagtaatgcaagagagataaaacatataaaagcaggcatactcaaaaagatacagtacaaaatactgaaagaattaacagaatgagaaaaggaagcattaaattcacatcaaagaaagctttgaacattaaagcaaatgaaagtgaggggaagaaatctatatggaagccaaacaatcactgcttcctgacagctgcagttattaattagtgttccatcatttgcactaaatggtcaatcaatacttttgcttctctggaaggccatttgctttgtagcttgcttcttaatgggaaatgattcagcttgtccccttctttgtcattctgtccataactaccagcttggcagagagttcgtaagctgtgctggctctagataagggtaagaattttgtctccagatttcagttctctcctgcccaaccacctcacctgcaatctattgtttatattgttgctatgtatctctattctttctgcatcaaataatgaatagctcattttgtgttgccttcaagtatgacaaattcctttccaaatgtgattccagacagtatatccaaacatgtctttcttttcccattcctgatcatcctacatgtcaagcactgccaacgtttactcaagaaagcttggttagaacccagcctctagaagcagtagattcctactcattcctgactcttttagccacttgtcgtatggcatgagcaggtgtcttaacttctctatttatgtcatcacctcctgtttcctatccacagagctaatacctagctcagagcattattgtaaaaataaaatgaactagcatatgtatataaaaagtaaggtggttacctggggattggaagacacttccatcatatttgttaagtgaatggcatagagcaaataaaaaaaaattgactcattattcttattattcttttatatgattactgctctctcctggagtgcacttctctgcctgactcaccctttaagatacatctcatatagaaactccacatgaaagccttccgtgacgcatgatcatggctattcactcctctattctgtcacagtcctttgtgcatttctcttcatagctctcacacttcatttcaccatactgcacatctgattgctttactagactctgagaatcactgttgctagaacgtatttgttcactgcttacatttccactgttaccatgtgcctggaacagcttagacataactatttgcctttgagtagaccaaccctagaaacaccatactatatttaaaacaactagtttctaatcatggaagtaagacactaaggtggaaccatttcagactgggagtcattttgaggttcacagtgaagctatttcatatctaaacctcaggtgagatgatatttttttgtaaacttagggttaacaaacctatttataattattgtgttaacacaatgcttcatgtactactgatttttcttgaagtgtatacctataggaaatagaaatgtccatggtcataggaacatagaatcagacaaaagttttcgagttaagataactaattggaaatcatatggacataagaattaaataaaaatgggttatttctagagatatatatgtaactaagaaaaaacaaagataaacagatacttgatggcacattactgaatttcaacaatattccttcaaaataagtgacaagagatagtatagtcactgtgatatatggtcctgtccagtgacgttctgggccctaggtctagacccattatttgggttaccagaggttaggcgcttaacctctttctttgctagttttttcatctgcaaaacaggattgaataacactcttacctactcaggtaattcctaccctatgagaagggaaagagataaagcaagtacaagtatttttatactctaaaactctatagaggccgggcgtgatggctcacacctgtaatcccagcactttgggagactgaggcgggcagttcacctgaggtcacgagttcgagagtagcttggccaacatggtgaaaccccgtctctactaaaaatacaaaaattacccggttgtggtggtgggcacctataattcccaactactcaggagactgaggctggagtattgcttgaacccaggagggggacattgcagtgagcagagatcgtgccattgcgctctagcctgagcaacaagagcgaaactccatctcaagaaaacaaacaaacaaaactctatggagtcaaagatactgtgaaatacagcaagtccctgggcctttggtgactctgtatattaacagagggctctcattcaagaccttatctattgtccagcattatttgtctactatgatattcatcttttcaggacctaatccagctggacctctacttttttaatggttctagttttgatttgtatacagtttcagcagcaaactccctacaggccatacactagattcacgtccatttggcactgaggaacaaaagaaaatcaccctacctaaagtgatggggagcaaaatattgcttttgatgaatcactaatatagttttatctagctacagttttgtcaaaaagagactattgttgcaaaccaagttaaatagttttttaaaatattttttattgtagcctaatgaagattacttaattgcctgtttaaaggacttggtggaaaaatatgtgaaccacagctttagaggcccatgagctttgggcagtctatgtcatgttcatctccttatccccattgttggctccaaaactctgttagagtgttcagcaagtgttaaactgctcctaataatgcctaagtcacagtgttggatctcaggtggtgcagacttacctatcccaacttgagagaagaatgagcagccgccataggtcattaacatgccgcctgcatcattcacttacccactaaattgaggtacaaccagatggaaagaacatgggtttttggcacatgggactggatacctgaagtatggaactcattcctaaacaatggctggaagctttgggtagattccctgacctgagaattgtatggcgcattgttaggaaagctaagtctgcaggaaaaaaaaaaaaaaaaaaaggcatgttttggggtcctggctgtgctgtaagcaggacaaattcttaggatttctggtgctaattgagtgaccttatacataccatttcccctcctggggctaaaagaagatcagagaggatcaaagaaatcagtggtttaaaaaaactcaaaacaaaacaacttgagaccctaaaacagtatttggcctttggaggtttttgtttaataagtttaaattgtccccaaagtgtttctaaaaggcaggttgtgctttgctgcaatacaaacacctttgtttctgatgccacacagcaggcttgagagaagcattggtgttgtatttgccctttgtacccatctatgtttgacactcattgaccaaataggttaacattttaggagtctatcattctataaaccacctgagtgacctagaacaagtaactgaatgtctccaagccccagatttctcatttctcccttggagatggccattataatatctgcctacctatgtcagtggttattatgatcaaaggagatcaatatgtgagcatgctttgcaatctttaagcaggaagaaatgttcattagtgaggaaggataaagcttaagcgggagcttggactagataactgctagacaaggtcatacctctattatgcagttacagtatttgataataaaatgtctttaataatcaggaaaattaaaataaatgggggcctcaattatatctagaaagatattcaagaagacagactctcattagaggagaagtctgtggcaagaggcaaacaactccaagattggtttcttaactggttgtgaaattgcctccgtttatcccataagcagacctccccctgagtggatttccttaagagaggttatataggtgaaagatccttatgcctggcagcatattatttagaaatagtccactttaaattgccatggagagaaccaccaaaagatgcagagagctgtttgtgtcacaaatgttaagctataatctcactttcagatttaacctagttttctttgggaggccgaggcgggtggatcacctgaggtcaggagttcaagaccagcctggccaacatggcaaaactctgtctctactaaaaaattaaaaaaaaaaaaaaaaaagccatgtgtggtggtgggtgcctgtaatcccagctgctcaggaggctgaggcatggagaattgcttgaacctgggaggtggaggttgcagtgagccaagatcacgccactgcactccagcttgggcaacagagtgagactctatcataatgttattaaacatgtaaaagaagcatctgacaataatttcaaataagctgcttaattttacaaaggcattccattcctgttttggcactgccattggtcatccatgtgactttgagaaaactactaacacaaataaaaaataacaaatttaacttagttttatttaactcaccttggttttattcattgagtagtgatgatgatggcaagactggggaaatggtagaaacttatattaattgaggtttttttttgtgccagggacgccacacagctctttagcatttcataaagtatcccaatgatcctggaagttgagtaatgcattatccctaccttacagatgattcatccgaggcacatttgtgttagcattttgttcaaagtcacacggatgaccaatggcagtgccaaaacaggaatgggatgcctttataaaattaagcagcttatttgaaattattgtcagatgcttcttttacacctttaataacattatgatggtatgaaaacacattttaggcagcagccaataaacttcaatataataacaattaccatcctgatttgatacagaagcctccaacttcaggtgttcttttaatattctatatgctagtcgattttgtttaccatacgcatagttataaacagtcagtgcacatgttgttgactgacctaaatatttacactgtcacatattattaaaatctcagtgcttttctccaattctgtaagattaattgtctactaaccaatgaaataatttgaatttctacttttcttcttataagcttaggctaatttctatcaaagagaagtttctcaaaaatgaggactggaataaaagcttctgtggcttgttcacagcctcattgactggaagaattgtgtctcttggtgggtaactgtgcatggggtgctaaggactgcttggagtctaagtgggaaaatggcattctgtgactgggaacctctgttccttaaaccttttctgtttaattagaaggaaggatgtcccattttatcctcacttaaagagcaatgaaatgattaaaaatagtgttttaatttcacaacttaggagcaataaataattttgagtctctggctgtcactatcagttatcgctcaacttaatattgttgaagtttagataaggacagatggttctctcttctcagtattagttctgttgcttggcagttaattacctgctactgtgactccctctcccatcaccaagaaatcataaaaacagaaaaagtaacggtatctttctccaagaagtttgctttgtctcatggattggttcctttgacagttttttatttgagagggctcctcttcgtgttcctaatatgccaaagttaagcatgcaacctcggtcttcatgttcacaagttgaaatgggcgtgtgcttcttttacaattatgtccaatacgctaactgaaagtagaacatgcctttctcctaggggttttcaaattcataggatggtttacatttattagcttctgaagtaaggaagatttctcttacaaaaataaatcactctattttttgttaaattgaatctactttgttccccacccaatgttgatgcaataaggagaattttatttgttctatgacttttcaattcttgcacctgatttggaatatcacatcattctgtctgccccttcggtcttgttttatttgaatctttcagcccaacagtcagctttgctgaggctacaaagaaatgcagtgccaccaaaatatgagagaataactaagctggacatttcacaaggctgctgatgtgagaaaatacaattttagcaagttttaatctatgtccctaaacaatcttaagttgaaaatattgagagaagtataacagtaggagacaatgttttgcctaattttttcagacttcaaattagtgaatcgaaatcatgttaaaaatttgcaatttcagttcacaggcagatttctagattttaatatataacagacaaaccacttcagcaattacttttgcttgcactgtggtttttgagaacattggagttttttccatattttccattatctctgagtttttcactgaattttgctatctttacatattctttctaattgaaaagggataatttgttcgtccttgaattcagttttcaaagacatctgaatatttgaaattcacttctctttctccattttttttttgatgttatcctctctgtgttttctttttaaggaaaggtaaccttttgattttgttgtttattttttgaaaactattgtttcaattatgaaacagagataggaaataataatccgataaatgtccaaaactatcattatatagcatgacattcagtaaatacccagtaggagtgctggcttacattgcagaaagacctgcagagacccaaatgttgaagcattgaaagagctgaatacattggactgaatacatagaattcttccctaaaaaacaagggaggcaagtactgtttttttggtttgtttgttttttctcagttttcaccactaatttgcttataaaggaaagaaaatttgagtttctgtggactcttgttttattacattcatacaaaacttttttttttccagttatttcacaagaaagaaggtgtttagttgtccacaaaggactatgcctctggtttggtgcaatttctggttttagtagttcttatccctattgtctactccaaaatgctgtcagcacagtttctccagccccatttatcatcctgtagagtagtacctctttactggctcactttcaaatacctgagtttgctaatgttgcagctttccacgttacaaaagaccctggtagcctccctagagaaggcaattatctattatgcttaggggacacaaaagtagctcacggagggaagtgcctacatactctgctcatgctgaggctgacctaaatcaatttcagatgcctataagtaaaaattgagctctgtatataaggttaaagctgccacatttttattaaagaattatccttctaggataactgcaaatgttgaataattttcatggtgattacaatgttcaaaggaactccaaaataaaaaatagaaatgacacctattttggagtatcttacttccatttccattcactgtctgttacgttttcactctttattatagattgtatgtctgtctttggtttggttctttcagtcttatgatgtgttaataaactattatagactatgtagaggatgtaatcattaaatacagaatacaaacaaaactaatcttttgaaagctattatttagagaaagagctagaacctatgtaaacatatatatattctatatatatactctctatatatattctatatatatactctctatatattctatatatatactttctctatatattctatatatatacagtatatatatagactatatatactgtatatatatagtctatatatatactctatatattatatatactctatatattctatatatatactctatattctatatatatactctatatatatactgtctatatatattctctatatatattctctctatatatcctatatatattctctttatatattctatatatatattctctctatatattccatatatatattctctatatatattctctgtatatattctctatatatattctctatatactctctctatattctctatatactctctatatattctatatatattctatatatattctatatatgtattctatatatattctatatatacattctatatacattctatatatacattctatatacattctatatatacattctatatacattctatatacattctatatatattctatatatacattctatatatattctatatatacattctatatacattttatatacattctatatatattctatatacattctatatatattctatatatacattctatatatattctatatacattctatatatattctatatacattctatatatattctatatacattctatatatatattctatatacattctatatatatattctatatacattctatatatattctatatatattctatatacattctatatatatactatatacattctatatatatattctatatacattctatatatattctaaatacattatatattctatatatatattctatatatagtctacatatatattctatatatagtctacatatatagactatatatagtctatatatgtagactatatatagtctatatatatattctacatttatatgtgtgtgtgtgtgtgtatatatatatatatttttttttttttttttgagatggaacctggctctgtagcccaggctggagtgcagtggcacgacttcagctcactgcaacctccacctcctaggttcaagcaattctcctgtctcagcctctgagaagctgggattacaggtgccggctaccatgcctggctagtttttttgtatttttagtagagacaggttttcaccatgttggccaggctggttttgaactcctgatgtcaggtgatccacctaccttggcctcccaaagtgctgggattacaggtgtgagccagcatgcccagccctcctgtgtaaacatattaaacgataaggtgctcactattttctgagctgtacaacaggaacaattgctgaaaagaatggtacctgaaccctgtattgggtgaccattggccttttgtgtcctgtgatgggtagggcttggcctaggacttccagacactaataccctggggtagaatgcaggcaattagtaattaattgcactgatgtgtctaacatgttgtagtagtggcgattattgctccatttaattcgatgagtaatttagacattaatgcaaagttttagaagtagcagcaatcatttatattatcctttctcaatacattaatagtttaggaattttcattctgtggctggttggtgagatgagatgaggccaatgaaaactccttggcccaggggattggagatttgaaatatttactatgtaagtgacattgttagaaaacactaggcattatgccaaaattacaattatgggttagtgttatggactgaattgcgtccacacacacacaaaatatatatatatatatacacgttggcgaggtgcagtcgctcacgcctgtaatcccagcactttgggaggccgaggcggatggattacgaggtcaggagttcgagaccagcttgtccaacatgatgaaacactatctctactaaaaatacaaaaattagctgggcatagtggtgggcatctctaagcccagctacttgggaggctgaggaaggagaattgcttgaacctgggaggcagagtttgcagtgagccaagattgtgccactgcactccagcctgggtgacataacaagactccatctcaaaaaaattttcttaataaacatatatgttgaagtcctaaaccctactccctgtgaatgtaaggttatttgcagatagggtcctagcagatgtaatcaaggcaagatgggtgttggggtaggcactaatttaagttgactggtgtccttacaagaacagaaaacaccatctggcaatggagatacagtgagaagatggcaatgggaagatagaggcagaggtgggagtgctgcagccacgagacaagaaacaactggggccaccagaagctagaaggggacaggaaggatctgagagctcatggtccagccaacatcttgagttagattttagacttctaaactccacaattctgaaccagtaaacttctactgttctaactcacccgatttgtggtacattactatagcagccctagggaactaaaggagttagaaaccttttcatacttatttagacttactaaaattatacctatcacaaaatattcacaaattggttcaaagaagttgatcagaatgatgatatatatagccaacggttacattcaattaataaactacaaatgagaattattgttactaatgactcacctgggaagaactattaaggtaatttaaagaacacactttatatttagagaaattagctaaatggtcaatgcagttcaatcagtagttttcttatatttactatttcccaggaactgtagcaaaaacaaggatacaaagataaataagagaagacattatgaaagttggttctctatgaaataataaccaggtattttcttttagaattcttgtgtgaaacttcagaattctctataggctattgcattttgttcccaatgctcaggtcttatagtagtgtgcttgccagataaaatatggaggtccccgctgaatttaatttattgaggcttttttgttttgttttgttttgttttgtagtaatatgtcctgtgcactcgttgggacatacttatgctaaaaaagttgttttctggaattcaaacgttactacctgccccacattttcatttgctagatgttgcagcctgggtagtagtgaaagtcatatgcaagatatcaaaggtgagaaactgaagaatcaacacttggaagtggctacattcctacaatctcacttattgccaatttgctatctcaaggggcttataacaattttcagtcatctgtagtacttaagtcttaggaatattttggtgattaaatgaagtagtacattgtaagtgttagaacagttactgttgaatagttagggccctgtaactgttcgtttttatttttttttcccaaatcagtgtaatgcatagtagagcattttcctgtattttgaatgaggatacaagagatggccacatgtgtacatttgctaacaatgtctaatctatttgtcaatactgaaagacacatctttgaaaaaagatgggtcttgttccgtttggttttaatcactttgtaagattccagttcagtgcctgatgagcctctgactttagaagcatgctgttaaatctaaacttttttttttttttttttttttttttttgagacagagtctcgctctgtcgccaggctggagtgcaatggtgagatctctgctcaccgcaacctccgactccgtggttcaagcaattctcctgtctcagcctcctgagtagctgggattacaggcgcaggccaccatgcccagctaatttttgtatttttagtagcgacagcgtttcactgtgttagccagaatggtttcaatctcctgacctcgtgatgcacctgccttggcctcccaaagtggtgggattacaggcgtgagccaccatgcctggcctaaatctaaacttttatgtgtccagtgtattagttcttagggctgctgaaacaaaaccacagattgggtcacttaaaacaacagaaatgtattctctcacagtgtggaggttaaagtctgcaacccagatgttggcagggttgttttttctggaggttctgagtgactctgttcccggcctttctcctggctactggcggttgctgttagtccttcgtggaccttcacttgcaggcttatcactccagtctcggcctccatgctcactcacatggtggtctcctcattgtgtatatctgtgtctcttcttacaaggacactggtcatataggattagggtctgcccgaatccagtattacctcatttagcttcatttcatctacaaagaccctatttccacactaggtttcattcacagatgctgacaactagtaaaacaacctttgcagacattataacagtgagaaaattatggcagtgaaagagatctgatgtaatcaacctccattttgcctttagccttcaaactgcccttaattattcctgggtttgggacaagctaatttggggaaatatttagtttatagttaaatgataatagcccttctcaaccacctttgtaaagctaatgagagaccaccaggtttaaaggatgagaggaacttaaattctgctacggtgtagacataaaggattacccaccattatttcaaaggtcacaagatacacaacttctctaattactcctgcagataacatcactatttgtagaaccaaagattggcctttccagatgtcttttcaggtttttttgcatgcacatctgatgatggatggctccacctggacccactaatcactccagtgaccccaccccgagggactcagcatgcgggaggaacatcttccattcccctgggattgcacccccaaccaattagcaagctcccattgccaggtcaccccctttcttccaccaaattatccttgaaaaaccctagcctctgaatctgggggaagactgatttgagtaataataaaatttctgtctcccgttcagccagctctgcatgaattaagctctttatttcaattcccctgtcttgataaattggctctatttgggcagcagtcaaaatgaacccattggtcagttatactaggctttcaacatactttgggtggacacaataaggaccagtggctatacttcaggggtattttgaaaacctcaacgattacattttatattaataggcatcttttttaacatttaaggtattctctacagtgtatcattggtatagagaaacaaaggttttctttcaaaaagtgttttcctcaatatttctagaacatacatttaggaactatttagggaacaatatctaggtaacaatacatgaatattatatttaaacactttatgatttgattgtaaaacaaatttcacagtctagaattcccaatgctttgagaagtaaataatgggggtaaataaaataaaattggtaagagaactattttttttcttttagcttcccttattttggggccttcatctctgcattccaaattacttcattatttttaaagtgccattcaattttcaattgtataacaagtgtttgctaagcaattacgtaaattttcttgtttaggtgggcaattagatgaactgaatgctaagatattttaagctaatattcttgcatgaaaatctaaattttctcattttccagagaaatgttaataaattttactcagccatgcaattaaataaatgccaacacttagattattactattcttaacaattaacaaatttcacaaatacttccaaaattagagtggtgtaaagagtagtcttggattgtgaatgacctcattttacagtttactaatctataaatgaacattaagtacctaataataatgccattgtcatgtttaaatactttatattagtaaagaagctataacagattttccatagcatatattcaaaatatattatttctcttttcctctccatttttaaaaataaaccacacagtcatgcccattaaatataaccagatatatttacttgcttggttttccttttgttttttcttgtcggggaattatagggataaggaagagattgatttttgcttttttttctgctgaagttataaatgcttgaatttggaattattttgtaattctagttgaaatgtgaaggagcatttactataggaaacatatggtcctataaaccagtatcagcagttttcaggtaatcaataaaataaatacgagatatccccatgataccgctattgtccaataaacgattacctgttacacagtgtcctttgcattgtgtaggataaaatgacagattatgtacaccgattttggtaatttccaggaaacaactgactcacagaagcttaggtggtgtacttggaatataaatgcacatactaatggagctgattttatcattcttaaagcataatcaaagtcagtagtttactaccactgaggagaatgatgctttagatcccagggcacttaccacaggaaggatacagggatgaggccatttgtaagccacatccagaagatggtgagatgacctctgtgttcctcacataagaaatttaacaccagcacttacccacacacactaaaaccaaataatttggatagcctcgttgtgattcacgtacatgtttcccaattgccggcaattttcactgtcaggctgactaaatgcagatcattaacttacagggtcatgtttttcaggccgttttggtattatgtaagaacattctcaaatctataatagcaagctctacccagtaatatttatagaagcgtatgtgtaattgttagtaggagaaatatctgaagacgattttattcgctctgtaaatatgtaggtcagggtcttaagaaaatgctcattgtaaacatttcttttttggacagggagatgtccctgatgttccccctagatgtccattgaagtactactcatgggagattttatttaggccacctagcattttgctgagcattctggttgtcagaaaaagataaagcacctgctgttatgttgttgctcactaagtagagaaggggtccaatggctaaaccgacgatttcaactcacggtggcaaagagcatcacgagcatgctcaggaagcacgctgaggaggcgggcacccaaccgaacctgcagagacggaggacatctttctggggagacaatacctagactgagttgtacaagatgaatacgatttagttgtgtggcgtgatgtttcaggtaaagcgttcatcttgagaaaatgcatagaataataataataataggggtctgaagaagaagataagagtggtatggtctgaccaggtctgtcaagataagtagctgtaatgagggagtggggaggtcacggaaagcttgtatgacttgcaagtgagtttcacccttatcagatatgcaatggagagcccttgatgtttattgcaaataatgcgagccagttttgtcattggcacttactggttttttgcttgtttgttagatatctgtatcttccagaagttactgaagataatggctacaggtgtgtcaattggcttgcttgtggtaatcatttcacaatgtatacctgaatcaaaacatcaggttgtacaccgtaaatctatacaatttaatatacacaatttttaggctgcaaaaaaaaaaaaaacgaaacaacagcctttgtcctaattccattacacattaaaacatgtattaactagtagaaaaaaagcacagtctgttcttcgagttgaataaaatcctcagctttctgtccttttagacaatctaccatgatcttaaatgaaaggcttaagttcaaatgtggcagtgttccagaagtagtactgtgctgcatatcaggtcagaaccaggcagggtgtaggctgtttaccatagaaggggatggcctcttagtgccaggtcgtcgttctcagtggaaatatatttagcatagatcaactggctttggtttcttcttaaactctgttcagaaaaaactctgagaggtggctacttgatattttaaacttgaccacaagtgttgaataccattcatttcaactatgaaaaaccatttccattatgaagtagaaaattaaaccctctggggctgatccacgcggagctcagttgaagtattacactttctcatctcaggaaggtgggcttctgatgagtctttccattgctgactaagccccagcacagcaaacctgttcttcattagggctcctcagacagcaactcaccacctccagggagtagcttaaaacagctgacccatacacatatactgttgagacaaaagtcttttcaattaaaatagaggcatgatcacagtgagttttaaacaggagattcatatgagcagattctgatttttgaaagacgacagtaaaagcagaatggaagtgtcaatttcagaaaggcaagaggatgtacacaggttacctaggaggttactgaagcagtcagtgctaaactatttgtattaagaaaaaaaaagagcttaagagaaatgcacatttatactgttgtgtcaaactccaaaaataaatggaaattgtgttaaacaataactagtatagatgagtaattttaaatatatgtatatatatatttatttgtatttctaccagatgtgtgtattaaatatagatatagatatagatataataaaacacaggctagagtttattaaattactatcccttatgatcacagccctgaggtccattataccagtttggttgttcttatctctttattgtttacatccattttctatgcaaaatgtgaaaggagctacctctctaaaaccctcggaaagattttcaccttgaaaataacaaaaaatggacagcttcttgtaaatctaatcaaagctctaacatgttttgaccagttacatagtttttaaaaggtgagggacagtagagctaatttaaaatgctaacaagtttttaggtaatcaatcttaacaattagatgattaatagctggggagttaatcatccccagtcacaaaagaatggctctgctcctgcttcatacacaattaattgtgagccagcaacgtcttgccattatctactgtgtctgaacagctattgagttgaggtttcctttatcatctgatgatgtataatttgattgtttcccttaaaactcattcctaaccaaaaatcaaaagaaacatactgagactttgatgatgaaaataatatatctaacatttaaaataaatagattttataacttggtgacgaactcagtttgctctctttccctactccaataaaaattattggttctgaaactaattttgacatttaatatcacattaactttcattgtcatttaattgctccatgtcctccttgttttcccatagattttaaacccctaggccttggacatatttctgaattcctcatcccattttataacattgtacacatccaataaatgtccacaatataattgaacagaattgagatcatgacgttttatctcagtaacttgataggcttgtaattatacagtatgccctaaagtgttgaattacataatctctacccccttttattttcttttacctgattcatttcttatttataactaatgtttattaatatgtaaatatgccccatcctttcctcctgaccgcaacatatatatacaaggactgtggtttctgttttatttacatttgtgaccagtttcttgaatgagtggctaaataattcagtgaatagaactcctactatctgtttcattgacttagtgagtttttaattctctcacttagtgaaattttacttgtcatccttgtttttatttccaccacttcccattcctaaggatgccttctattctataccttagttttagatggttaccacattgatgaataataatcaattctttttattttatatgaatgcaacatcagcttccattttcaaaggaaccttctatccacagaacacaaactaggaccgtgctaaaatttcaggagcctagtgtttattgtgttcataaactcatgacattttccagcttgaggtgatttaagaggccatgtagcacaaacttgtattttacagatgagaaaactgagcattgagcaagttaaatgatgtaccaaaagtcaaatcactagtgaatggcaactgagactgaaatcaaagtcccctaggcctggctgtgtccagattgtacgagtgcctcatgatatctaagctacaaaaccatgatgggggatgaggggagagtcttgctagtgtctcacagtgcggctggatgacaagttaggaacaacagcaggactgaggcaccagagttgctaggctatgaaacacatcacgtggaaccatggaatcacgtgcaatattttatttattatttattattttatttttattttaatatttgcttaatatttttatatatttttattttaatatttgcttaactgttttttatttccatcaagttgctcatttcaatgtttaatgaacatttagggaacagagtccaagatctgggttcaaagacctgagcagcagagtgagatgaaatcaagaaacctttcataaatctaaaaaatgatctgtaggctgttgatacaactcacaatatcagattggcagcctggaaattagtatcttcagttgaggaatacattaaaatcttaaactaaggtctttcaagaaacttaaaacagcacggatagaagtgtgtttttaacgtataaaattatttgtgcctgggatttaatttctttaacacattccaaaattcctttagggcataggttttgttctgcacaccactgaaattctgcataaggcacagtgtctagaacccagaaagtattaaataattttttgaaaaaatatactcatgtatatattccttagtttttgtcaatagttatttgatatttagtaaaaattacattttttgtctatatatatatataaaagcatccaaaatgatagagaatagagtgatatctaatgctaactgcccaaattacacaattattcccagcgagtacctatcatatgctgaggaattaatctgtagattcagatacagtacagtggccaagattcaccaatagatttctatttttttcttatacacatttaacatcagaatttgaacatcatagaagtttcaaaacagtttgtagaagctacttaaaatttgtttcagatctcctgtaatatacattttattattttgaccctgcaaagcaaatatcatttttatttataaagccgatgacataaaagcttattatacagaaacttgcatttctcatttcctaaaacttgttttctcttcacatgttatgactttgtttcaacttaccataaattcaccttgctgttccagttaaacttgaaatttatcgtgtactccttgctgctaaccagtaagtcagtgaggaaaatattgtatgtcagatgcttttctcagctctattttcctctcttgttggaattgccttcttcatttttttgtgtgttgtatatgatattctactgcatttttaaagaagagagataacttcaatgcatttataattcaaaggtttactcatgttgttcttctgttccagatgatagattttgaaccattctttaacactgatttggccatcataccaaaaagaaatacagttgtccctcattatccgtgggggaattggttccatgaccccatagataacaagattcaaaatccaaaatcggatgcttcagttctttattttaaatggcatagtattttctataacctgcacacatcttcctgtatactttaaatcatctctagattacttgtaatacctaatacaatgtagatgctgtattgatagttgctatattgtattgctatttgcattattttttattattgtgattttaatggttttgtattttcaaatatgtattttcaatctgcagttggttgaattcccaaggatacagggtgaaagtgtgactgtgtatgtataaaagaaactacattttcaaaagttgatattctaatcataaaaaatagactgcactaatatataatcatagaccactaatagaaaagatattaattgggattgagaatggaaatcctatgctggctaaaaagtctctgatgagctaaatagactgattttgctaagagctactctttcaagagcccacgggaaataggtacttattcagtttagtcaaacattcaggaatccagacccttagtaatttgaaactgtgacagctacaaacttgaccaatgtcaaatttacctatttcccatcaaaataaatatttacataggaaataaatcataaaaacagaatatttggggatgaagcattattcttttcagttgtcattttattcgtttgcttattatttatagtgttttataattaactgcaaaaaacaaaaaacaagaaataaaatatatacatttaaattcattttaaaatttaaattttaaaccatgttttaaaaaatctaactttagattttgaaataactcagactattttgctaatttgtttgaactagtacagtctcatattataataagattaagtgacatttacttagtttgactaccctttcctatagcgaataaactgacatttaaaaagttgctgcttgctggcacttaagattgactgatgaggatgtgcagtcatggaggaagagccaggactgagaaagaaatataaatgaggaaaaggaagagagaaaaggagccagacaagacttgaggagagatgagagaaaggaaatactgtttgagggtagaaataggataaatgaagtcacagagaagaggctttcatttccacatctgttacttgaccatgtccatggtatgagagtttcatagttctttttctgtttttgcaggctgcatgctcaaatattctctataaaacataaacccatctccttaccctctcttcatttagcatttattttcaagatgctggctacattggtacattaatttcttatagatatttaatgagtcagttcacattaactggtgttcccttgcttaaaataataataataaagatgctggtagcttgtacctatgattttggtcaccaaaatacaggatgtttttccattacccagtactaataaaaggtgaggtacagaggtacagtaggtgagacaaattcataggctggcagcagcttagtttttcctatatttgaccccaactggagaaatgtgtattattatttttcaaggctgggtatagagctatatattgttgagctgttttattaatataaatatatagagagttaaaattgttttcaaaaagcatgttaggagttcacctaatgggagtgactgagaagaagaaaatgcacagaatttagtataaagaaatcccaaataataacaataaaaaagcataaagtatatctgaagatttatgttcaacaacctagttcaaaatctataagaaggaatgatgatattatcacacagaaaattatcttatgtgaggttctagaactgactgtaggtgtcacacaaaatttagacaacagagattctgaggaaatcaacatatcctacatcaaggaaatagattaaaatgtggtatggtctaaaggtaagaggtctgaaccaatattttaaactacataatgcaagatatactaatattagattctaaatatttttaaatatttgtgatgttacttgtacttgaacaaatgaattttgaacatgcttcataattctgaaactctgccattacttaatgatgctaaaatatgcataatatcctctcctcaaggaatctcgatgtgttttccaaaattaaaactgtgtccaaactgagttttccaaaatccttaattttgagtaatgctgttatctttcacctctggagtgttcacaaaatctatttttattttctgaaggagtacagcgtgtatatattaaacacagctaaatgaaccgagaaagaaatccagatgtttaaccatgaaatctaaattttgaaagagtcttttgaaaatatgctgaaatgttttcaaaatatcatgatgatcaaaacaaattgttattggaatgaccttcactgtaagcagtattaacaatccggtattatacagaaagcatacatctttttttgaaaaatctttgtaattttaccattcagtgataaatataaattcctgaaaatgccattcttaccagaaaaccagtcaatatggttttacattagagcttttaaaaacttagtttgtggccaggcacggtggctcacgcctgtaatcccggcactttgggaggccgagacgggcagatgacgaggtcaggagatcgagaccatcctggctaacacggtgaaaccctgtctctactaaaaaatacaaaaacaactagccaggcgttgtggcgggggcctgtagtcccagctacttgggaggctgaggcaggagaatggcgtgaacccgggaggcggagcttgcagtgagccgagatagcgccactgcactccagcctgggcaacagagcaagactctgtctcaaaaaaacaccaacaacttggtttgaaacatgtatatataaatgtatatatttaaatatacattgtggctatacacctctaccttctctgtattacttatctatgtttatagctatttatatacatgtatatgtatgtgcatatatatacatatgcatatatatgtgtagagaatagaactgtagttactagcagcttggaagagtagagggtaatagggagagattggttaacagacgtaaaattttagctagagagcgggaataacttctagtgttctatagcacgttagggtgactgtagttaaaaataatttagtctatattttcaaatagctagaagagaggatttcgaacgttcccaacattaagagatgataaatgttccaagtgacagatatgctacttactctgatttgatcattacctattgtataagtgcactgaaatatcactttgtacaccctaaatgtgtacaattattataggtcaattacaagccaaaataaaaaaaccacacaaataactcataagaatacaatataacaattattcatatggcatgtatattgtattagtaatctggaaatggtttatagtatgagggaggatgtggataggttatatgcaaacactgggccgtttgacataagggatttgagcattcctggagtttcatatggagcagggtcctggaactaatcttctgcggataccaaaggataattgtataagaatcttggcagcaaaattgtggcagttcagaactataaaaaaaagtcaaagacaatgggaaaaaaagactcagtcaggtgtccttattctctgcttttgatggggcactgagacattgcctgtgaggatttgaggattgattatttccttgtgctaagtgttttcctgaactatgtgttttacctgaacattgaaaacctaccaccacatctgagggaagaactgttgttatttacctatctttcatgaggcaactgacacaagtagatattaactaacttgactgttagttgctgctactaaagggcagagatgattcagagtgaggcagctgcactccagggttccagctctcaaccgctgtgctgcactgcctcccaggaaatactgaagtgctaagcatggttgcgggtctacggatgatgcattacagtttatggacagaaaaataatcaaatgcttcatctgaagaaataaaggattaagaacaatagaacatagattcttcagaaactggatcatatgagtaaggtcacagaaaagtaaaaaagtaacattgttgagttttctgccttttcaataaattaatgactttaggaaatatctattagagatatataattttaaaatatacacacatatatatatataaacttttattcaggtatgttagagagaaccagtagagggagcttttagccgtaagtttactttctattgtgaaaggaattaatcaaataatgtgtgaagaaaaataaattctaaatatgattattatttacgtgatacttcaaagcatccaaaaaataaattaagaatgttatttttttcagttactttggaactcagttacaagacatatttttatttatagtaacaggcaaaatgtatttattgtgtacaacatgatgttttgatatatatgtacattgtgaaatgactaaatctggctaactattctatgcattacctcacatagttatcttttttgtagtgagaaaacttcacttcaactcagtatttttgaaggacctagtatattattaattatagtcaccatgttatacaatagaactcttgaatttataacttctgttaactgaaattttgtatcctttaatgaatacctcctcattccccaccagaaaccctagcccctggtaaccagcattttatttattttatttctatgggatgaactttcttagattccacatatgaatgagatggaacaggtataacgggttatgcataaagtgccttatgtacaggttatacataacgtaccttattatacgcttataacttatgtgtaacaagtataaggtgagatctcattgggttttaatttgcatttatctgataatcagtgatgatgaacatttttttcatatacctgttggccatttgtatgccttcttttgagaaatgcctattcagatattttgtcttttgtctttctgtgcctgatttattttacttaacataatgtccttcaggttcatccatgttactgcaaatgataacacttcgttcttttttaatgggtgaattgtattctattgtgtgtgtgcgtgcatatagatagatatacaaacacacataccacatttgctttatccattcatcctttgatagatgcttaagctgattcaatatcttagctattgtgaataatgctgcaataaacatgggagtgcagatatgttttcaaaatactgatttcacttcctttggaatatgcctagtagtgggatttctgtatcatatggtaattctattttcaatttgttgaggagcctccatcctgtttttcacaattgtactaatttatattcccacaaatagtgtgcatgggttctttttctccacatcctcaccaatacttacactttctcattttgataatagccattctaacaggtataaggtgatatctcattgggttttaatttgcatttatctgataatagtgatgttcaacattttttttcatatacctgttggctatttctatgctttcttttgagaaatgcctattcagatattttgcccatttttaaatcaggctattttattgttgctgttgacttgtttgagtaccttatgtattttgaatgttaaccttttatcagacatatagtttgcaaatagtgtcttccattcagtagattttctcttcgttttgtttattgttcctttacctctgcagaagcttttatgtttcatgcgttcccatttgtatatttttacttttgctgcctgtgcttttgatgtcatatctaaaaagttttattgccctgaccaatataaaaatgctttcttctatgtatttatctagtagtctcaaagttgtgggtcttagatttaagtatttaatccattttgagttgatttttgtatatggtgtgagatggggatgtaatttcatcatttcacatgtgaatattcaattttccaaacagctatcaggttctgggctcttctttgacggtagacattttattactgatttaatctccttacttgttattggtctgttaagattttctgttttttttttttcataattcactcttggtagatggtgtatatcaaggaattaatccagttaagctaggttatccaattttttggtgtataatttttcataatagtctttgatgatcctttgtatttctgttgcatcagttataacgtctcgtctctttgtttctgacttagtctttctctttctgcctttcttaggctaactaaagatttgttgattttgtttatctttctaaaaaaatcaactcttagttttgttgatcttttctatcacttttctagtctctattttattgatttctgccctggtccttattattttcatctttctactaactttggacttagtttgtttttgtttttcaagtttcttgaggtgcaatgttaggtcatttacttgagatcttcttttttgatataggcatttattgctataaaacttcttagaatggataaagtaattcttagaattgcttttgctctcccaggggttttggtattttgtgtttccattttcactggtctcaagaaattttttaaagttttcatgaacattttttcacagactcattgattgttcagaagcacgttctttaatttccatgcatttgtaaattttctgaagtttcccctgttcaatcaaactattgatttctagttttatattattatagtcataaaagatacttggtatcatttcaaaattctgattttttatgaattgtggcctaccatatgatctattttagagaatgaatatgcatagaataatgcttattctgtagttgttggatggaatgttatttatatgtctgttacatacatttgatctagaatgtagttcaagtgtaagtttctttgttttctgcctgggtgatctgtccattgctgtaaatgggttgtaaatctcctactattgttttattgcagtctatatctctttttaagtatattaatacttggtttgtatatttaggtgctccagttatgggtacatacgtatttacaattgttatatcctcttgctgaattaacccctttattattaaataatgacttatttttacctttttacagtttttgacttggagtccatttaatcttatataaatatagctacttctattctcttttggtttctacttgcatggaatatatttttctatttattcaatttcagtctatgtgtatttttacaggcaaagtgagtttcccatagacataccatttaaatcctgtgatatgaaaatttgcctttttgatgctgtcacataagtttcataagctttttttcagtccttgtcattctttatttttttcttctgactttatattttcaaataacctgtctgtaagttcacaaatattgttttctgcttgttcagtttttcttttgatgctctctattgtattgtttgtctttcattgtatttttcagctccaggatttctgtttttttttttaatttaatccctctaatgaatttctcatttttttacttattattattattgttttattttgttcacttctctgtattttttgaagttctccgagcttctttaaaatggttattttatattattttcaggcacttcatgtattgctatttctgtatgatgtcactggcaccttaaaatatctgtttggtgttgtcatgattctcattgttctgatctttgtacttctatgtcaaagcctgtgcatgggaagtcattgcttattccaatttttatagtcttgctttttctaggaaagccttgtggcaggcatagttctggggcgcatcagactcctgagccagtgttgaccagtgtagcactgccagaatcctgggtcctgctttagctggtacaatgctggggcatgccagaatccctggacagctgtgactggcatgacactgccaaaagcctggaacccactacagcaggctaggtgttgtgtttggctggaagcccacagcctctgagaattgcttgctcctgagggctacccaaagcctgggaccactgatgtcaatatggcagttgtgtaggccagagataaatttcactaagcaagcttaaagtgtgaggctatgtggtctcacctggtgagacctggtgtcctggtgggtctataggctcagtctgctggtactggttcggaatatggagctatgaggggtctgctggtgcagagttttcctgtgagtacccagtgttgtgtccaggaaaaatcctgtgctcacatccctttcattctatctagtggatggcatctctttccatactgtgctgcctggggttgggagaggggtgatgtgggtattgtaaaactgtgattcctaccctttcaatgtgtcttttcttattattgtactacaacgaggcactgtgatctctcacgtggtaaaaagatcctagcccttgtgacgttatttttgtgcatagatagctgttcagattgatgtttctgtgaagggatgcttgctggagagtcctactccactgtctggctcccacaaggcatttttgactgctcatctgttgctgtgctggatattatcatccacaggagaattgcaaagatgggtgcctagacacaacgagcttataattttgctggtaaaattgttagcttattagaaatgtattgtgaatgaaatttatacataatagtgtattggcaataagcttgacaaagaagataagcaaacaggagttagaaagaccagagcacagagaataatagctgttcccgaaaagacaaaggatatgaatttatggtgaagactgtgaagggaattttcgatgggaaaatattatgagcaacatggctgatttaggaatgggcatggagggtgaggaatcatatacatacaaccaaaataaaaggttaatatgaaggatataagacacagatttgaatattgcatgaggccgcaagtgctggcaaggagatgaaagtgatccagatggtagtaggaaataagaatacattctataatgagattgcagcaggaatggagagggtaccgaaggatggagctagaggataattaggaaatataaaaaattggaaggaaaaaaccctaacaagaggcaatagcaataatccaggcatgaagtgattaactttgttagatgtgatgtgctgtttttcaagccatataataaactctccttactgaacaaaacaataattatgtgctttcattctcttgcttctccttttagactgtgttaaaaaaaaaaaaagaaaatttaagctagttttggcagtgttccagtgagccagtttgtggcatttttgtccatctgcctttactttcatggtttactgattgcttattttgcagtcttttgtttattttatttatttcttcataaactaaataaataacatttatctaaagtatcagctggatataatggggatagatgtccagggtaattttccatcatacttaaagtcttctttaggagtacttttcacattccactgccaaccactgaccaccagtatgttcacctttagccttcagaactcacggaagaataggcaagattaatcggatcataaggatcatatagaaaacttataaaaatggtaagggtaaaaaatataaattggggtcttcaatgccagtccagagtgtaataatgaacaactgtaaagtttatgtatgaggtgataattttaagtcaactcttttgagagattagcatggggttgtccttagaacggactgaagagcggaagattagcagcagagagagaaatcagaaggctgtacaataggataagtatgaattgatttcagagggaatgaagaagatttaagtaggtaatgagagaagagtaaaaaatcaatgatttactagatgtaaagactggagaaaaaatgtcaaagatgactgatatacacagtttaaacgattagtactgtaatagatatattcgggaaacgagctagtatttagttgaaaattgtgtgtcatttttaggcacattgatttttggtactcacagttgatataggcatatgtacaaatattttaaagctatttctcatattctcatagattccataaagaagactaaaattctaaaggttgaatagccttcatttttttaaaaaaagtatagaactcattagaaattagatttttttcagaaaaatatttggctaaaaatagtgaaatctttttttttaattttattttagatgtctgcatcgaaaccctgataggtatttcatgctatttcttttctggaatgtgaaatccagtattaagtttgatacatcaatcagtatgctatccactctgacatagtgaaattgattagtaaaaaaacaatgcttgtgttgtagaattaaaatttcctttttcttattattatggagaacacatgtcagagtccataggaggtacaaacaggtattctatgacaagggacttgaaaaggtggtgtgtttgtgtcccttaaagttaaaccatcagtggacctaattagcataagttatagatgccttttttcctgaggttgacaccatggagttatttgtcagggatatttttcatccctggaatttgtctttgaatgcatcttattacaaactagtgattcgaccaaattatggatgtacatcatttgtgtttagctaaatagtcacttattgtgtaaagacattttttggaagctctagagtaattcactcttctatgcactcctgcctatgcagtgacttttttttttttaatgtgtcttaagtacttgcctgaaaatcataaccatgcacagtacaagtgtctgagtaaagttacacaaataatattgtaatatgacaatacacatccctcaattagtagcaccaagaataatgcccttgcagtagacctgacaatttcaaacaccatacaatagggaacagcatccaagacagccaaaccctctgtcatggcagaaacagaaacagcctgggaaatgttacctccatattcacttgtggtagtaatcataactgtttattgcttaaattagagagaaagtccaggaaaaaaatttcttatttagctgagtagttttctcattcaaaaatgcatttaactttaggccaggagtggtggctcatgcctgtaatggctcccagcactttgggaggctgaagcgggcagatcacttgaggtaaggagtttgagaccagccttgccaacatggtgaaactctgtcgctactaaaaaatacaaaaaatagccagatgtggttgcacgtccctgtaatcccagctaattgggaggctgaggcaggagaatcgctggaacctggggggaagaggttgcagtgaacagagatcgcactattgcactccagcctgggtgacaaagtgacactctgtctcaaaaaaaaaaaaaaaaaaaaaaaagcatttagatttaaataacatttaatgagaaaatgaacaacctggttaaatatcaaatgattaaacttacattagatgtatagaagctaccatcaaaattaagccttatttactgggatgatttcaaaggtttctattcttatgctgattattctgtgattatttaaaattggtagaaagatctgattctggctcactcacttctgcttcttccatttaattagcaagtatttgccaagtagttattatataattagcattgtgctagagtctttacgatgccaacatttcaaggagcaaattgcttctctcaatgtctgcattgcttgaaaatggagttgttaagtcaaaactcttaagctgccagtaactttctccctctgtttaatagtttaccaagacctccaatgttggaactatcttgcatgtcacaccaattaaataaaatgggtgaatattttcaaattcagtggtggtaaatgtttctagaggaacacagctgtgtgagtgggtgcaatagaactggatttgatatcaagtggccttctacaagtatgattttccacaaaaaaaacacaaagcttaagttaagccctgttattcctactttctctaccttcagatttgagtgataaagacaatagaataaaatatatcctctaagtagaatatttgcattatgtaagctaaaaagattggctttttaaaacaatcaagtggtgaatattcaactccctaatccaatcctttttctttcagaacaactttggaatttcaagatttcaaggttgtgtgctctagggctttgaaaggcagagtaactgaggataattctttgcaaaccataacaatattaatagaatcatcccatcatggttttagaaaacaacaacaaccaccaccaatccattactaaattttacacccaataacattattaaggaccaaaatggatttaagttttttcactttatttacaaacatctaatgctaggcacccagaattagtcctaattgtgctaggtattgctcctagagctttaaatttattatctcatttgatcctcacgataaccctataagtttggtatcattatcttttattgaagaaaagaagtctaaggcaaaggtaagttaaatgacttgcagaggatcacaaagtcagtgggtgattgaaccaagatataaacaaagacaagatataaacaaaggtatactgactttgccatcttaaaagtctgttaaggcggctgggcgcggtaatcccagcactttgggaggccaaggtgggtgtatcaggaggccaggagatcgagaccatcctggccaacatgatgaaaccccgtctctactaaaaatgcaaaaattagccaagcgtggtggtgcacacctgtaatcccagctactcaggaggctgagacaggagaatcgcttgaccctggaggtggagattgcagtaaactgagattgtgccactgtactccagcctggcgacagagcaagactccatctgaaaaaaaaaaaaaaaaagaggtctgttaagggtaacatttgccattggtagataaggtttcccttcacaaaagaagagaaactatggcatatgtgcagtctatgccttctgccacccactaaatagaaagggtgcatgtatcttggaagagactcgttaatcaaacagatgtgctttcaataatggtgaaatctcttcattaagcactggcagtaagtcattacaatatcttctctagccttttggctgtgatcaagggtagactatcttctcattaggataatggggttcaataaaagagtgttccatcgttctccaaaagggagtagagtggaactttttgttaactataatcatttagtgattcattttatcttttttagatcttgttaattcattgttgcacaaggttaatcctttatccacttaggctatggttttgacaaaatgtgttggtcataaaagttaacttcttaaaagacgttaaagacagtttcaatgaacatcagtaacataatgtgtggaaataagaaaagtattttgtttctatttgcttgcccagagtgatattaattaaagcatgatttatatattttaaatgaaataattgaggacatttttgacatatgttttcattttttgtggcaaacaagatcaggagaaaattataaatatttgagttaaacatgtatttggcagtaatattgtttgtgactaaggtcagtccttagtctcacaagattatattatcatgtaaaagttataacaataatagatccatcaaaaattggaaaatatgaaaatgagtctctccctttgagttttttaatgcaattttaccaatcaaatatgacaatgatgaataattttgcacatttacttttagtatcttccccctatgaaaatgcttgtattataaaattttacctactggtaattacagttaactcacaaacttccatcctgattatgcctacttaccattagatcaaaagcatttgccaatcatatccttttaaataatcatttgaatggttctgatatttcaatgataaaattctgtgatttagttttatgcttatagttggatatttgaattatcccagatgtttttgctattataggtaacctagcaacaaagaagttttttcctattatcttttttccatatttggggatatttctgtagaaaataatccccagaattgaatttattgaatcaaagagtataaagctcttgatacggagtccctgaattcttaaggaatatgtttaatccatctatgtagctctggaaactggcttactacctagtatgctcgttacttacatttttgaatgtgttaaacttttaagaaaacctattaaatgactactttatgtgcatggctatctgataataatcttttgtacttataatagattttcctaatatctaataaattttcacatacattatctgaccttatacctacaaaatacttgcaaggggcacaaggcagacattttgatcatcacttttcagagaaaaaataaaaaaggacctaagagagattaaggatatggcgtagaatttagtcttcttacctggaacagcagtggctccattacatcctatctctgtgtacatgtgctttactacggaaagaatttgaaataagttgattttgttttcttttcagtgaataattgcttttattcttaaggaggaaaaatgtctgtcagaatgattttgtctgttttatagtgaaaaatgcataccactccttaatcatcatcatacaatttttctaaatgttcagtgcaaacatcaatatatgttaaagcattattttatacgtttaaacagaaatgaaaggcaaagatcaaagtaacccattaaactctatttatggtacttaaaacattagttagggcatttttaaatgtactatgtgtgttatgtaagtgtgagctctgaattacaaagtaatttaaacaaatacggattcctaaaaatttctcccaggcaagtccttacatatagatcccctataatggtttaagataattatggactgaatatttcttagttttttaaatttagagcattgattgaacattgatgaaattttttcaactttaaaaatgtattttataatatctatccaatatgattgaatattaaattattcacgggatgaaactgcctgctataggcttaatgaacacaatgtacaaaatatactagttttccgtcttttctcctttttttaaaaatttttatttactttttgaatcaggaaatgatcaacctgatttcagagatgagaatattaaagcccagagagtaaagtagtttgtccagatctatgtggtgttttcttttcttttcttttcttttttttttttttttttttgagaaggcgtcttgctctgtcacccaggctggagtacagtggtcgaatctcagctcactgcaagctctgcttcccgggttcacgccattctcccgcctcagcctccggagtaactgggactacaggcgccagccaccacgcccagctaattttttgtatttttgttagagacggggtttcaccgtgttagccaggatggtctggatctcctgacctcatgatccgccctccttggcctcccaaagtgctgggattacaggcgtgacccaccgcgcccggccccaaatctatatggtttttaaggatctttgctggggattcaaagcctattttgttcacttcaaacctcagctcttctcgctgaacaaaaaggcaattaaaagaatgatgatagacaaagttgaaagttcactagtttataatttttaaaaatcctatgccaccatttttctttcagtagtttagacttaatacgtttttgaagattttaactcaatgtaatggaaaacatttataatatgatggaaacatttttaatgaagcttttcaacaaggagttcttaaaataaataaactttgtggtcaaacagagattaaatggctatctattaagaacactatggaatttctattcaaattgggtagcagactaaatgacttctaagatacaatcagtttgtgatttaattggttcttgaatggatctgcctctggcttgtagtctttatactgtaagcatttatacaacaagtctgcaattcaaccatttgactacaaattgccgtaagtttttggaaagctattaaagctcctctaatttttacaaaactctcttgctaaagttattgtgtagcgagggcataccatgtgtcaggtattatgaaagttttccttccttctttctctttgcaattgctctatctacctatttatctaaaatcacacacatatataacatatacatatatacataggtatacatgtacatggatacatgtatgcgtatgtgtatctttactaaatatgtatctatacatatatgtgtatgtatctatatgtatatgtatatatttgtatctatacatatatgtgtatgtgtatctttactaaacctaacagcagttttctaaagtaaacacttttattacctacactttgctagtgaacgtaaagaaagtgaaacaaattgccaaagattacataactggcaagtggcaaagctaggactcaatctcatggacaagtgacatctaagcctttattcttaactactagattatcttatgataatttaaacttgtgtgtatgttttatctttttgttaatcatcagagtcaatgatattcagcatcttctgcagtacagaccaaggaaaacaaagccaagctgtcttaggcagccaaaaaatgactatccatgcaaattaaatgtcactatgttttacaaatttgtctttactattagacatcaactaaagtagttcagaaaagagatgataaaaccctgaatgagtgaagctatagaggaaaatgtgaatgaaaaattaaaaagaaatactaagtttaaacaaatttaattgtggtagaaatttaaatatagaagatggatttcaggggttgtagtattaccacctcaatatttggaggatctgtttacatgtcttctcctaccactggcagaagagccttggggttagaactttttctgtcccttgttatcttctcagtatctcacctggaccaatgctatggcatgttttcaaagataacctagtagtggtgatgaaaggcacagtttcttcatgtttaaagatgagccatgggtttccttttatattttctcacatagactcccagatctgtgaggtcctggaatgtacaagtggttatcctcataaattagctaacaccagaattcatctagtagcatagagcaaaggattgctctgccaacatctgaacaatcaaatcctggcccaaacaagccaaattatctcaacatcaactcatattcttaccacatcctgatgttcctatgctgatattgcttgatcatacagattccattttgttctcctatttgagagtttgagaatctgcttctcttctctttccacccctacctcaccctcctcccttggaattagagattgaatgatctcggacatcttgataatctctcctctctgctctgtatgctcagctactcgtcttacaatcattaatttttaaaatttaactacatgagtgtgccatttgtttttcccacctccagggaaaagagatgaacttgactcatgattttgatcccatgattcatcctcagcccttgctgttggatgtggcggaacactcactagtcctttaataaagatcagatgctgtgtggatactggtgggcttcttgagcaggttgctattgcctacctagaagcatttgccgaggattttcttttcttttgtcgtcagtgctataatatgccacagtctttaaattgacctcagtagtgtctcattgaacttaatatttagttcatttttctgctgacttttgagaggtggcatggccagaaatgtatatagtgattgtatcttttctctttttgccttatgaaatttacttaactatatggcttactaaatatataactggagaaattaaatagcaaaaattttactactttttccatgaaaagttaagtgtttatgtagtaattaattgcttagtccagcttcctgagatataaaaataatgctgataggcattaacaggcgatatgattcactacttttactcattcattcaattttatattccaaagaacatgttttctaataagaggataattaaatgtttacaagtgttatcttggaagtaaatccaacaataatttataataataaaatggtgtttgggttatacatgtggcactgtctcaaagagtcttaatagcatgggaaaattagttttattgtgcagatatattaataaatttaaagataatcaggataacttttgaacatttacaaatgctcaaattcgagcatacaaatttgagtatacaaatttgagcatacacatttgagcatacaaatttgagcatacaaatttaattaaagtatttttacctttttgccaacctaacatccttacgtgagaatagcatataattacatatcactataaagagcacattgtaagttatttacatattgttagactgttagaatgttacctgctaaattggagtgggaactaaacacacatacacacccactgactgagtctggcacatttctgggtcttcctttccttacaggaattaaagttcttgactaagtgattcctaagtttttcccaagtataacatgggtatacatttatgtttctaattttaaagaggctactaaatcttacattttatcatgctctctaattcctcttttttttatttttaaattttactctaagttctgggatacatgtgcagaatgtgcaggtttgttacacagttatacatgtgccatggtggtttgctgcacccatcaatccgtcatgtaggttttaagccccacatgcgttaggtatttctcctaatgctctccctctccttgcccccaacccccgacaggccttggtgtatgttgttcccctcgctgtgtccttgtgttctcattgttcacctcccacttatgagtgacaacatgcagtgtttggttttcggttcttgtgttagtttgctgagaatgacggcttccagcttcatccatgtctcttcaaaggacatgagctcattcttttttaggcctgcataatattccatggtgtatatgtgccaccttttctttatgcagtctatcgttgatgggcatttctgttggttccaggtctttgttattgtaaatagtgctgcaataaacatacgtgtgcatgtgtctttatggtagaatgatttatcatcctttgggtacgtacccagtaatgggattgctgggtcaaatggtatttctgattctagatccttgaggaattgccacactgtcttccacagtgattgaactaatttacactcccaccaacggtgtaaatgcattcctatttttccacagccttgccagcatctattgttacctgactttttaataattgccattctgactggcatgaggtggcatctcattgtggttttgatttgcatttctctaatgatcagtgatgataagctttttttcctatgtttcttggccgcataaatgtcttattttgagaagtctctgttcatatcctttgcccacttgacggggttgttttttgcttttaatttgtttaagtttcttgtagattctggatattagacctttgtcagatgggtagattgcaaaaattttctcccattctataggttgctgattcactctgatgctagtttcttttgctgtgcagaagctctttagtttaattagatcctatttatcaattttggcttttgttgccattgcttttggtgttacagacataaagtctttgcccatgcctataacctgaatggtaatgtctagattttcttccagagtttttatagtttggggttttacatgaaagtctttaatccatcttgagttaatttttgtatgaggtgtaaggaaggggtccagtttcagttttcagcatatggctagccagttattctagcaccaaattcccaattagccaaaaattggtttaagtgattcataaatctcaagtaaatctggatgttaaaggttgaaccttaataataattacagagtaaatggaaagtgagtgaatctcactggacttgtttctttagagccaagggttgaggcagagttcatagagcctgacttttatggattcaagttgtgcaggattttctgaccaaagcttcatcctgtgatttcatcttggtcagttaaatctaaataaattctactgtcatttactaaaatatttagggcattgttatgcaatctaagattatttacactttaataaatacatgaaaattctaattgtatttattgtgtcaagttttccattgcaaacactgatttatttttttcagtcaaataataactcaggaaaaaaaatagaccaggtgaggtttccttacacattatccatgctaccatttatttaagaaacatattattgatcttttatgtttttgcaaattccatgtaattaaaaaaaaaatgtaagaatggtcaatatctgaacttgcttctgtgttttccatgatgacctatttatgttgcattatagaatttaaccaactgtgtatgaaagtttagatgatattaacatgtgagtcaataagaaaagaactgttatacagaaatattggaatgatttgactttcaatattctatactcaattgtatgcaagttagataaaatcatgttgaattttatctcatgtacgttaccaaagcaatacaaattccttagaagttatataagtaaaaatagatttatttttaaattatcctggaaaacattgtcttggtattcaaaccattttcacctgtgtttatcatcagaggtttccatcttttagaacatttatttaccagttctcttgtatttttctcagctgtctgtttgccatatggtgttactttcagaattctctgtaatactgagaggttgtgcttgtggtaacataggataaaattccatgcagacttgaatatttgaaatcttactatatgaagattcaacctatacgaaaatagaagcttaaccataatttataggtattatgttagaaaaatcccagctatttctacatctattttttattcttttgtggacatgtagatacattcttagcaggcagatctggcctaaggcaagctagtggtatagcaacattggctttcctgctttcaataagacacaagttttattccccctgaagtttaatgcctcatatcttaatattctcttttgattcccttaaggcaaccacccatgaaagttgcattcagactcttcattctcagaaggtatactcaaatgctatttcttccagagacattttaattctagtaggagtcaaactcgtaaagaaaatggttgaaactctgagacaaattgataggtagcatgtatagttaagcctgctataaacagtaaaagaagcaacataaggtagaacattttcccctccaaggagaaaaaatcatgtccgttaagtatattttgattcattttttattgtaatttttgttatccctggaaatagaacaaaaacatgtgtcagctgactaccattgaacctgtacacaccctgcttcagcttttatccaatgagaaataaaattaagtcatgtaggttgttagagtctctctctctctctctctgtctctctctctctctctctctctctttttaactgaacctggctgcaataataatactgaccttgactgtgacctctctgtgtgatagttccattgctgtgccttagagtcgaatggtatctctacagttttttcagaattcttgggtaaaaaatgtagcaggtgttgtcaggggttaggaaagagaggctatttattctttccctgtagttttggatggaaataaatactttttaggtgatctgtttctaagaagtgcagttttccggaaaccacacaccgtattctcaaaactattttcctgtttcttccttagcatttagtctaatcatctcaaagtaaaggattattcttaataaaagaaaatacggctgctcacattaaatttgcttcaagtccaggagaaaacctgcttcaaattttttaaagacatttttgcctccattgtatatggattattagcccaatttataagagtaagtgccagaatacagtctttggtggtattttagggtgatactctcctgcaatgggattgattttagaatttgtagggtatatactagttgaggatgtaattggaatttgtgcctgtaaacctataagctccaatcctaaaagacacatgtttattcattcaaaaatatatatctagcattggtgttgtcggttactttgctgggcataaaaactcagagatgaatcagacacagtagagaatgtctgcaatctataggaaattatattctgaacagggacggactcaaaagtgtatgtgtgaatatatgtgctcttttaaatccaagaaaaatattttccacatcaccaattgtgccactgaaaaataaattgttattggtatacagtggcatttgaagatattagaaaactcaaatcaaaaagggaacattgctctgccatgaataaatgatgtttatacttctctttgcaaactgctatgtcacctccaggataacttgtcaagtgcattttcatattatgtttcaaataacactacccaataagtggaacttagaaaaatgtatcagtgtgcatattcttatgttctgaataataagaaatgtgaaatgtcaagtgatgaactaatagcaaacaaataattcaaacctctctaggttagcttgcaacacagagtcagaaagtgcatcaagaaaatgtaacagtgtgcagaatgaatttgtaaactgatttattgacacattcaaatgatacagtgctatttataggacactgtactatagatgttcctgcagttactggagaagaaactcttgtcctgtggggtctacagtgactgccttgcttcaataacatatgtttatttgccatatcgttgtccattttctaaaatagaatatactttgtaaggattttcaataagtttatgaatatgaaacgaaagtggatgactgaaggaattttctaggcttcattagttgacatgcactctttttgagttaaataatatgatattctagaatctaaattgattttctatgaaaatagaaacaaaaataggaaaaaataatattttgatctactccgttggtttacatgaatgcctgcaaaaaataagtaattttgactacctacaaaattgtatttttgcacataccttatagtgtctcttgttttaactaagatgaatttatgataaaaacatgaaaaaaaatcaagtggttaactctaatttgtttattaagctatgttagtaaaagcaactaatactggcctatgactttccaatttaaaaagaattttgtgtcatttcattgaactctccattagcatagtggtatgcttgataacattatcttctgggcaaaattagttgtactactataagtacccatatcactttcttgcggcattgacatctctagtatagcacttgatagtatatggtaggtatcttttcatatcttttctagactctcaagtctcattaagcaaaagatgtttattatctgcgccagtcacacacttcccaaattcaatatatacacacgggcttcctattggtagtaagactttattaactttgattgagttattgtttcaccaaatcgaaaactgaggttccaagatgttaataaatgtacccaagaatgcatatgaatgagaagtagaccaaaatgcaaaggtaggtcctctaattctaaatatcagttctttctaaaatcttgatcttccaacctttcctgttcttagcgcatttgaaattataggtctacacagtataagaaacattattaaaatgaatacagacatattttaaatagtactaaacatttgtgttataacacgtatatatgtaatttttcagaactgcttcctatatacaggtcacagggcactgcctcgtggttatttctaatccaccccacagttcaataactcagaattgtaaaatgtgatcaaataaagtaatcatgatgccaaattcccttaaggatgcatcatttttaaaagtttcttaatatgaacatttcgagtcagtgatttagacagctttgaatatcaatttttcatgaaaaagaacaaatgcgatgacataagcagacagtgatccacttgtgttatgaaggtagcagtaaatgggtgacaatttcttgaaatccagatatgttcaaatgagcagagttggcagcgtgtcctaggcttttttgacaaaggaatgcagtgtcattatctattactttgatgatttatctacgtcacagtaactgcttcaaacctagaaaaaggtaaaggggcaaaaagaattatttttcattgttctgctatgaatccatatcagcatttaggggtttgttttataatgttccttaaataagtttaatttctttacataagcaagtgataattaagtaagcacttttttgatagtaaggaataagctcacttttaaaattctgttctctcacaaacatttcatgacattatagaatccagaaatgtcagctataaaagagatcccaaggatgatgttcatttctcctgctttacaaatggagaaactgagattccacatgaatatgtcacttgatcaagagagttgacaactaaatggaaattagaacttaagttttctaaattcaggttcagaggccggcttcagtaaaaatataggtgttgggaaaatagtacagtgatttccatgagattgcagccatctcttcattattatggtcatgaatatacatatctcatttatttttcactgctatggctctatttcttatttcaaaatgtaaaaacagcaacttttctcatctcttggtggctatatgaacttcagcaatacagaattcagtggattgggccttctccatttcctatttacttctgattacattgttttctcatgatgcattttgttttcccatctggaattcattctctgggaatctcctctctgagaaagcttcaaaaccaaacagtgtttattttttgtaatgacattgcttgcactttcattctgtaatatctccattcagaaatctttaattgttcccaattcctttctagatgagatcgcaaattctctgcttagctttcaaggatcagcacactttcaatcactttttcttaacacttcccaaaacccacctggcgtattaatcaaactgactttttgtagcctctgattagtttcatttctgtacctttgcttgtttctgttttccttttttcctgcccacaaaagatgtaagatctcctttaaattgtgaaaatctctagattgtagtgcttctcttctcatgcactcctggctgtgtgaacataaaacatggaagaggttatcccaggtgtggtgctcaactgtctgggtgaggctttgatctcctgagttctggtctctgtttgccgctgtattggtgattttcatgctgctgataaagtcataccagagactgggcaatttacagaagtaagaactttaatggactcacagttccacgtggctggggaggctttgcaatcatggcagaaggtgaaaggcacatctcacatggtggcaggcaagagaagagagcttgtgcagggaaactctcctttctaaaaccatcagatcttgtgatagttattatgatcaaaagaataatgcgggaaagacccaccccatgattcaactactttccacagggtccctcccacaacaagtggaaattgtgagagttaaaattcaaaatgagatttgggtggggacacagcgaaatcatatcaccgcctacacctgacttcctttctgattcttctttcctgattagaactttcaggacttgaatctctcctctccttccctttttaagaccagagttaagcttcaacttgcttatttcaaaaacctcctactgagaagcactatcaatttgctacttatcactggtgatgatggcaaaatgatccaatcaattttcttccttcagttccatctaaaatgagtgcacacccacatatatgtgttgaaatgacttactttttgttttcttttggattggtatagtttttttatttttcataaaatctgtctgaaaacaattttatttagaaattaaacattatcaatactatatgtcaaggcaagcaactttctttggaatataatatatcctagaaatcaatgcaacatatttttacgtttagattacccccagatgcccagagcatttctttactggtgaaatacagaattcttggacttgacactgagaggaagtgtcagcagtgatctaaaaagtatttcttcttaaaataagggaaatgtgtgtgcttaaagacagagacattagaaaggggaggatgaacagattatattttttaaaaaatggttaggccgggcacggtggctcacgcctgtaatcccaacactttgggaggccgagatgggcagatcgccaggtcagagatcaagaccatcctggccaacatggtgaaaccccatctctactaaaaatacaaaaaaaattagctaggtgtggtggcacatgcctgtaatcccagctactcaggaggccgaggcaggagaatagcttgaacctgggagtcagaggagctgagatcacgccacagcactccatcctggcaacacagtgagactgtcaaaaaaaaaaaaaaaaaaaaaaaaaaaaaaggtgggtggggtggggtggggtgtgagagcaaggtccctcagaagttataaatggatgggcattagtgcatagctatctttattttccaggttaccccttatggaaaaaggttcgcagttaccataacaccaattaataaagccatatttgctggaaaaatcttattcaacagcaaagtatcacagtaagagaaaggacgtttagtaatttaatatataaaaataaaccttcggtagttttgcctgaaagaaggccagtaagtatcttaaacatcttagggagcttttacaagtgctgtagcccttgctttctgttttctagttaagcaaactttattgctttcaccaatgagttacagaatctatgactggtaattttagtcaaaaacatgagttcaattagatgtgaagatacaatcttggcatatgttcttaaatgagccaaacctcctattttaataaataaggtaaatgagcccaaatccatattttatggccattgctcagtgaatgactacacacactattcagtcacccacataagaaatcagtaatttttgtcattcttcttcctattacttctcacatctggttgaaaaacaaattcagtcaccttctaaaatatctttcaccactttcttctcttgtcattccactgccactgccttcattcacctctgtatcatctccaatttacctttttttttttttttttttttttttttttttttgagacagggtctggctctgttgcccaagctggaatgcagtggcataatctcgactcattacaacatctgcctcctgggttcaagccatcctcccaccttagcctcctaagtagctggcactacaggcacacaccatcacgcctggctaatttttgtattttttgtagagatgggttttcaccatgatgcccaggctggtctcaaactcctgagctcaagctatctgcctgacttgtcctcccaaagtgctgtgattacaggtgtgagccaccacacctggagactactaatttatactggtgtataatagtgtccaagtttctagaacattcgtccaataatggctgtaccacccagatatcaatgttttgtttcttctaaaatatagatataaccatatcatataactacactcaatgaaggagccgtttcagtggtttctcaaggcctacagaatataattcacatttactgcatgacatttactaacctgtgaagtcttgaatcaaagatacctagattcaaacataataggtatccaatacagatttgttgatagaaaaatgagagtatgccaaacagggtcaaatgaataagattattcagtttgccctcggcattcctttttgctcatctgttctgtagattcaatgatcgccaccttccatacatccactgtgcattcattctgacactggtcactgtcccatatgccaagaatacagaagcaaacaacacaacccttacgtccaccctaatagggttaataactcatagtagagtcagatattaaacaagttaatacgcagatgaatgcagaattactaattgtcataattgctggaaggaaggaaggaaggaaggaaggaaggaaggaaggaaggaaggaaggaaaataggaaagtgtgttccctgaaaagagagggaagcagactaaatttagtgtaagtgatggtgaactcagggaagcacttgcctcctgagatttgatgtaggacatgatcatttatccaagagaaaatgtgaagaagagcactttaggcagcgagaacaagtgtgtttgttctgttgttgttgctgtttttaagtttgtttgtttttgtctctttcttgaagatgctatacattcccatatttacactttattgtgatattgactctgttgcctggagtgctcttctctgtcattttatgtgtagtgaaattgttcttatcataccatctttttttttaaatattaaaactgtccttaccccttcaggcagaacttaccttgcctcctccctttgttcactcctttcaattgcgattatcccattgcttatagctaactgggtaatttatttttctctagaagacaagccttctagaaggggatacaacttctttattcaatggtaggtcctccgtgttattgaagacatgaggagaaatgaattcagattactgggagacaaaggggaatatttttcaaatcgccacttcaaaggatagtatgcgactcaaaatctaaatatatttaagaaagatatagttaattaatgccagattaacagaaattaaaataaatgaatattattttaacatagatccttacattgtttaagataaattcatacccaggggactaaatattctccaacttattttccttgttcattagagacaaaaagttgatttggattacttagaattaaaacctgttgtgagagcccttatatagaaattttaatagaatcatgtctagatagaaaataacacagtttacattaaacgtctactttcattacagcatacttggcaaaatatcacattttgtcttgttgtgggcttccattctttgaatgttactgaagcccagttcctaagaatccctggccaggtgtggtggctcacacctgtaatcccagcactttgggaggccgaggcgggaggatgacaaagtcaagagtttgagaccagcctggccaacatggtgaaaccctgtctctactaagaatacaaaaattagccggacgtggtggcacatgactgtaatcccagctacttgggaggctgaggcaggagaattgcttgaacccaggaaacagaggttgcagtgagctgagatcgtgccagtacactccagcctgagtgacagaacaagactccatctagggaaaacaaaaaacaaacaaaaaaagaatccctgtagtagtctgttctcacactgctaacagagacatgcctgtgcctgggtaactcataaagcaaaaagatttaatgggctcacagttccacgtggctggggaggcctcataatcatggtggaaggcagaggaggagcaaagtcatgtcttacatggtggcaggcaaggtagcatgtacaggggaactcccctttataaaacctgcagatttcatgagacttatttactatcataagaacagcacaggaaagacctgcccccatgattcaattacctccaactgggtccctcccatgacatgtgggaattatgggagctacaattcagatgcgatttgggtggggacactgctaaaccatatcaatcccctacaaagcccacaacatgtgggaattatgggagctacaattcagatgcgatttgggttgggacactgctaaaccatatcgatcccctacaaagcccagcaaagttggcttccatcccagtcttctgcagtctctctggccactttccgtcctgtttacctcatgcttctgctccatcctcactggcctcctaggacctctgaacatacccaccttgttcctgctccgagccttttgactggggtttgttgtgctagaattactactccacagatatcagataaccctatggcttgttctctcttttccattaagttctgctaaaaatgataccttatcagtaaggccttctgaaacctctaatttcaaggatgcttatccattcacccatactcctcatcttcctgtcatgccctattttccctataattaacaccatctgaaatactgtgtattttttttattatttactataatatgaaactctaggttgttcactgttgtcccccaactgtaggcactctataaattgtcattgaaggaaatgcatattaactttgcactcagcgtcactgggtagttaatactatttttcaaatgttataaaatcaatatatgttaattgaagaacatttccaagctgtagaaaatagaagaaaatgaaagtcaacaattatctagcaatcagtacagtaccatgattgacattttggtttacatattctttcagtcatttctttacctataaatatctatttcataaaatgaagatcatattataaatactgttttatagactacttttttagcctatcatgccataaacatttgtcaattgattaaggatttttctacagcttcacccttactggctctatagcgctccatttttcactctgtacctcttgattgcatggcctaatctgaagttacttaagccaagtacactgggaaaatgcttacctacagcacttagttatttaaagctaagtgggttaagtagtctaggaaatagacttggttttcagtaagtacattgcttattgctaaatgctaactttcagttaaccagttaatgaaaccagagggtcaaaaattgcaacatttaccagtggaccaataaattacaattcaaatgagcccagcccttaggaagattgtcaatcaaagctttaagagtactcaagttcatttagtcatattgtgattgaccttgacggtcttcagattattggtttattaaaagttctaggtagctcgaccttcttacgagactgtagaatttgagttaaaaaaagaaaagtctactgtcaccactgtgttagagattaaaacctctgcctagctcctgggtggtgattcagtttttgaatactatttccttttgttgcatgaagttataaaattaaaacttcaatttgttttccagattacagctagggtaaaaattgttttttattattttgtgttgtagagtttttttttttcttttaaattagaagatcaagttcgaggagtcaaaagcttaatttaaaaaaaaagcctcacaaatctatttcatttctagtacattacagttcagtagataatttgaaactgattcatctgttataccatctgttggaaatatgctacagctgttaaatgtccagcaaaatttgaactacttctcgaagtaatttgcccttggtacatgcagaccagacaattttttatttgatttacaaccaagatttctccaaacatgaccgattttctagctatactacttttatttcattattatttttaaacatagctattagacaaaccaaaatagaaaatgaaagaaatctgaactaatttttaagattaaaaataatgaatttattcattgccataagctattaaaattgcattgattgtgttcaatatttttcaaaatatatgaagacttcctatggtgtgccctacattctgcatattgggaaagaaaagaagttcccttcctcagaagaggattattggcagagaaatcaacatataaaccaatattgatcataatagattttcaatgatacagaatgaaaatattatattaggaacaccaaagtcttatgttctttttaagactaaaagtagatgtaaaagagctaactgacagtagtcaatagtttcaagtctcaaaaaactcatttgctggagccaagatatttaaaaagtcctaaagtcatgtactgtactgatgagttagacaaaccctctatataattcaggggttccaaattacaagtcattttaagttgttgaagatcagagatgatatttcttatgtgggatacagtgaagtagatctatgtgtaagatcatgggatgaagccatttctcttttgcaatgcagattttaaaatggaaaatacaaaaatacatcttagaagctaaacagatgaagtgaatacatctcaatagtcaaaactaggaagcactttgccttgcttgcttttagatggatttatttcttatcattgtcagtaattcattgattcaacagctctctgcaaggttgtgttatgctgcatgacagattttgaggctctgggaatagagagtggacacatcaggcacctgccttcctctcatggtatttacagtccattcaacaagaaaagtaataaagaaattaaaaacaaaccagataatttcagattgtggtgagtgctgtgaaacaaaacaagacagtgtgatagaatagtaagcaatgtctcaatgaagacagaaattgagttggttaatttagatgaactgatcagaaaaagtgaaggtagtatttgcgtcagaatcagagtggaaaggaaccagctcttttaaacctggtagagagaattttagctggacagcggagaggatggaaaggcctttgagcaagggtgtgcttggtgtgtatgagagagagaggagagtgaatctagagcttagtgacccagagaaggagtgaaataaaatagcgccagagatatcttcagggccagaccatcttgggcccagtggagcttcgattttatactaaataagaggggaagccatcaggaagccttcagggcatggcaaaatctgatgcccagttttaaaaaatccatctggcaactgtgaagaaaatggattgtaaggagataaagatcgaagcaggaaataagtgcccaataaatatttattgaatgaataaatgaaataaagttgatgtcttttgctgaggctattcaatgtaggcatatccattaaattgctgattatatatgggtttctctgagaacatctatttaaaactgcagaaacctctttcagttaaaagatgtgggtctgatttggcacacaaaatattgaaattcctgcaatattattatatagggtaacatttcatgtaaattcttagaatcaaaatgagaggtggtgagaacaatttgacaatttcaatattattaggtctgtgtagcccagtgcaacatatatgattttacctgaagtcactatagaaaccatttgtcccagaaaactagacttcaaaagcacaggccttagaatcaggtacaatttggcctttgtcctgactttaatatcctttagctgtgagatctgaagcctcctcatctataaaatggtaatactacccatctcaatgggttactgtgataactcaatgagatgacccactcaaaatatttacttggctatcacgtaagtgttcaataaatgattgctattactatcaattgattcgttgattgtggtttaatgatctctgccatctgtatattcatcaaggtccaaattggaaggattgagatgggaggtgggaaggctgcctcattcgggctcacccctataacactgggctttgtctcattaaatggaaaatgaaataaaagagtaaattaggtcacctccatctagtaggaaacaagagagatatagtaaaaagaaaaaaggaaggcagatgaatttattgtattcacttagcaattttcgctgtgtgtcagataagttatgtccaatcagttgatttcattccaattccattatctttagctttttcctaaattagcaattgatgacaaactaattgtacttctcttcatggtccttctgtttgataagttcttttgtgaacttatttgtagactctatgagaaaataattaattctcaatgcaattttatgacctgttttagcaatgacctagcactctagtattttctgtgcaaagttagttgcttctgccatgcagagcctaatataaataataaaagatctctaatataaaatgaaatacataaaatgaggctatatttgtatgggaatttctatgatagatcagtaagtgaaaaggtatgttaaagaccagattgtaaatgttttttgtttgtttatttgcgtgcatatctaaatatctgttacgttaaatgttgcatctgtgtatatgtactatgaagagtaataatagcaatgacttctatggattattagggttctttctttaactgtattgtatgaaattctacaggagcaagagaaagatgtatcttattttcaatagcaaagagtagtccagggaagctggagcaagagatacacaaaagcaatgtatgaaccataaaaatgggaggaaaatatggtataagtgaagatatataagctagattgagtagtagtcaatgagttctttgccctaagaaggagcatacatttttatagcatacttctataactctgaatgtttaaccatttattttatgttgttatgatttaaaaatctagaacgactgggtcaaaacaggaaaaggacttttgaaataatggaaaaactaaggaaactgtgggtaagacaggattaaacaagctgccccaatttatgttgctaggaataaaatctaaatattttgactctaaggagcatgctgctacctctgaaagtcacgcctttcaccaaaaagtattaattatacaaagttaagttaaacttgaccctcaactatgtctaaaaattattataaaaattggaagagaatatcatattctgtttcctgtactttccacatattattaaagaaaaatgtgatatgtgaaaattagaaaatgtaaaatataaattaaatttagacaaaatttggcttgcagacatcaggagtaatttaagaagctctggccaaacctcccaacaaacttgccttctgcttcccatcctgccttgttccttatgactaaaactatcttgaattacaagctgaacgaaaagctcttctatggcttcccaagcagcacagcagttcctcaagaggtcttttgtcttcccccgatgtccatttcagggtctggtgtcccaactcagtgctccaggactgcaccttgccttctgctcctgagtgtcccgatgttgtgtgcccccccacatttctgaccatcattagttattgcattaactaatgaccctgaaatggacatcagggggtagataaaagacctcttggaggaactgctgtgctactgatgatggaaaggaatagtcataacacgtgatgcagggtaaatgtgcaggtataggtagagtagctcgaacttcaaaaggcagaagttgaatgtacacgtaagaccacagagtgatgtgttcaactcagaatgtgccttttgccatggaatttttcctaatataaaagtgaggatgttattgctagaatttctgttcagctagcactgtctcattcttgagtcatttgttgtttttagttgttttcctccattaggcttatgttaccaaatgggtcatataaaacatctatttgaagtgttatagtttaaacatatattgttttgtgaaacattttcagacattatatttcagcagagatgcatttgaaaaccatacttttgtgtcaattacgtatattctgaagtcctttaatcttgtaaactcctgccagtatcccttgccaatagccaaacctctcagccgtatcttttaggtaaagggcaacagctatttcatgtctatttgccaataatttcctctgctccagcttgagttagtacaggattcatatagctagtctgccttcatgattgactgaaattgtgtgaaaataaaactcaaggcccatctgcttttctaattttcatccaagattccctggaagggaagtacgctggagaccaaatatttgccattgctgtgtatggctgtagttttggaagacatcccagtatgggaaaacacaatactggattatttcaaatgttagttctctttttctttcgctccttccctcctttactattatataaaaattctaaatttctccagggatttgactgatttcctagtatttaatgtctgcaggagattgagatacatgttttagtacaacaaaaaagcagactttttagaatgcataatgagtgataaccattattacagttggaaataaaaatggatagtatattgtaatagtcagtatggcaatatgtgcttgcatggagtgctgctacaaccatctctgggaaatttcaaattcattgtgggctctttcatgttgcttgaggtgttccctctttctaaaatttcctttctacctatctgtagtctctaatttcttcagattctattcattaattatatggcatctgacactctaatcattaatcattctgattcctaagttccttcatatttgttatactggataagaggtttggaaactcactctgtaaaagctcagatagtaaatagtttagtttcgtgggccatatgatatccattgcaatattctactgctgtgtgaaagccatcagagacaatacataaatgcatgatgtgtaactgtgctccaataaaactttacttacaaaagcaatctgtgggctgggttgggcctgcaggccatagttttctaactcttggtggttaacactattttggggttttcagagcttgagagaaacttaaacttcctcatattacttgtgtatcacctgtaggaaaggggttcattgacatattcagggtcacacgtttatgatggagccaggtctaatgagcaactcaactaacaacaaccctacatttctaatttatttgtggctttttgtatttgattttattctatttagcattgaattttaaaccatttttattactcttttgttgcttcatgtttaattactttttgtggattcatttattactgccacttatggaggaatatgccatatctttgtatgtatgtgtgtgtgtgcatatatacaaatggaatgtagcgaaatggaattatatatatatatgtgtgtgtatacacacacacacacacacacacacacacacacatatacatataatctgcctgaagtagtgaaaacagcaaaatgcagtgtaagatctcaataaataatcgtgattaatgtcctccagggaaaaatatagtaattgttgcattttttagcttataatatgattatagattatgttttaatttggaagaatgtgagattgctggtgctttacattctgataataattttgcagtcacctttaaaaaaaattgcttattggccctgatctttactaagctcaatttaattctaattattgttattctgaataattatataattttttcaaattattactttaatttttaaatttttaaaaattgatttgattttttaaattagtaaaaaatgtaaaatttggtactcagatgatgaattagttacagaagccaatttgtttaatgtaataactctaaactatattatggttttataaatgctacatataaattctaaatttaaattagctattggatcatttaatcagttatcaacttagtttaattacattcaacgcaaccatatctatccattggatattcactcttagaaaatgtgtcatgcattattatcaagtatgagctagcctgattgagcaggtatggactagaaaaatttctcctagcatgatcctgcagatttataacgtggctttcttcctcattttcttcatatttctactcaaatgctacctgatcattttgtcaaaactttccttgagaaggcagcataaaatagcaattctcttcctctccacctcacccccaaactccctgcccactgtttcatatttaatgttccttcttagtattaattaccatagcatactataaatttacattttttcgttggcatgtttcttcccacaaaaacataagctctacaagggcagggcattgttaatttcaccttcagctgcacttcagtgcttggcagttgatgcatatttaaatgaatgaaatgaacatgagtgaatgttagcacatttctaatataacgggaacattagaaggaatgtttactccaattaaaggcaacacttatctcaaaaattataaaaagttataatcaaatgtatcagaaagtaggaaaatcaaggatgtatgtttgtgctcacagctaaacagaagtagatgttttcgattaatatgaaacccattactttagatgatagctttgtgaattgatacttttaaaacaaattttaagttcttttcattcttttacatttaactttctggggaacttatttatacacacatgccatatttcacagaggcacgcagtataactaagaaaaataagcaattttacaaatattatatgaagacggatttgttgattttaatttccaatttgtatacaattgagtggtgagataataaataataattcatttctccagtatcattggggacttaagtgaatttacaagaaaattagtttattctttctgttgctaaaatattttttgcttataaatttgagagagaaacatttttgaatatatagagaaacattttctgttttattaaacagagttctgagcataaacatttgtggggaatttaagaccactactctaaaaattaagtgttgtggcatgttataatatgagatcttgcttccagactctttgaggttcattgggtttagtacattcattcatttatcctacaaatgtttttagagtacgtgccaagtaccattgttcagatcactggagagtaagcattaggccaactaaaacttcatttcagatagagctttctatctagtgggagagaaagacaacaaaacaattaaatgagtaacaacataacatatatgtattatgacagaaaatcaagcaggatgtggatacagagactgatggcaacaaaatgctgggtgaactagcaaaccctgtcctcagtggcaaaggtcacattgagcagagacctgtgacaagagaggatacttggagtagtagttgcaaaggcttacagcaggggtaggattgtttttaaaggaagaggaggggccaggtgcggtggctcacacctttaatcccagcactttgggaggccgaggcgagcagatcacgaggtcaggagatctagaccatcctggctaacatggtgaaaccccgtctctactgaaaatacaaaaaaaaaaaaaaaaaatagctgtacttggtggcacacgcctgtaatcccagctactcaggaggctgaggcaggtgaatcgcttgaacccgggagacagaggttgcagtgagccgagctggcgccactgcactccagcctgggcaacagagtgacactcggtctcaaataaaaataaaaaagaaaaaagaggaaaggggccatggtggctagacaggaatagacaagaacatggggaaagagataagactagtgttgtggccatcataggccactgggtggcggggtagcaggggttgggcaggggtactttgaacagtaggccaagttgagagcaggagccagagagcattttgagtacagcagccacaagttcacttacagtttgaaaagtgtttcttcagctgctgccggcaaaactatagcagagtgagaggggaagcagggagaccacacagtcttttgtaacagtgatctctggaagctgtatgtgccctatctgtagctatggagttgaagtgaggcagtaggatttggaacatcccagtatcagaagacttagccctccatgccatttcccagagacccagagagggacggtagactcagaacagtcctggccacgttaacattagaagcacttaggcgttggcaaaatgagaaagatccatcaaaggaatcagagagcaagcagctaatgagaaaaaagagaaaaaaaaatcttaatgacattataaaagccaagtgcagaaagtgttacaaatagaattgaggtattgcctggtttcagtgcagttgattggttgagcatgatgggaactgattaatttttctgtcagtaataattttcaagttgatggttattctgtctttacttgctgatgtctagttctttctttctttgatttttgagacggagttttgctgttgttgcccaggctggagtgcagtggcacgatcttggctcaccgcaacctctgcctgccaggttcaagcaattctcctgcctcagcctcccgaatacctgggatcacaggcatgcaccaccatgaccggttaatttatcatttttagtagagatggggtttctcctgttggtcaggctggtcttgaactcccgacctcaggtgatcaacccgccttggcctcccaaagtgctgggattacaggcatgagtcaccactcccagcctcttttttctattctagtgagaacatgtaacatgagatctgccttgataagtgtgcaatatcatctagaggtataatatttcacaccagatctccagaacttagtcatctcacataactgaaattttatacgtgttggttagcaactccccatttcttggtcttttggctttggtaggagtcctctttgtctttcctcctccaacattagtaattctagttccctgttcctataatgtataaatacctgaagatttccaggagatgccagataccaaagcttattacaggaacaagctcaattttactcatgattctcagatagcaagactgaggtgaagtcctttggagtaatgtgctttgctatggttttccatttgaatatcagggttatataaacagctcctgtgttatattatatttaggataacagaattgcctaaattcctttgctaaatattgtttcaaagatacataaaagacatatcagattcaatgattttttaaccaacacataccaatcgttatttcgaaatcgttgttgagtgtctctctccctctctgtcttttgttttcagaaaaatgtgatgagccacttgtctctggactcccccatgtggctttcagcagctcctcctccatctctggtagctattctcccggctatgccaagataaacaagagaggaggtaagccaaattttgattcttttatcaataaacatgttaaataagaacatgttatatttatagccatatatatatataatcacacaacagatgttggcagacaccagaaatcactcctgccacttctattaaaagatccatagatgccattaacctctcatgtaatctccacattgaaataacataggaaaacttaggctggaagttagagatagtacgtcaaaaaggaagacattttgaagttgcctgggataataaagtcaaaatggcataaacgtttagagttaaaattcctattaatcagaaaatcatttagaaagatgtaaaaaagaattgactcccaaaatgcgtacggtgtattaaaaaaagcactttgtatttactgtatattaatgtaaaaagttagttcctattgaaaatgcaaatgccccttgtaatttttcctccggtacccagaatgtagctctattataaaatctgtgtaaaaaatcgttagatgtgtgcaactacaatgtgagttcttgaccttaaatcatggtatttgttagtaactggcagtttcaaattttctagcaattcactgagagtaaaagaacataattaaggacagaggcaaaaaactcttttgcttcaaaggaacactggtacaaacatcagtgaatggcaacttaaaaaggaaagaaacaatattatctcagataaatatgaatcaacaaacagagaccatgatgtttaattcagtaaaacaggaatggtggtggttgacaggggcttcggtggagagggagaaaaaattgagatatctgttaaaaggtacaaagttttagttagacaagatgaataagttttggatatctattgtgtagcatggtgactatagttaataatatgttgcatccttgaaaattgctaaagtaacagcttttaagtggcctcaccatttatgaaaaataactgtgttgtgatggatatgttaattatcttgagttaattatttcacaatacatatgtcaaaacaccatgttgtatactataaatatataaattttttgtgactgcaccttaatacagctaaaggaaaataagaaatgtgaaatcataaaacaatctagaatcaaccaattctataaataaaaaaatgaaagggaatgaatataggaggaagtaagaaagggaagaagggagggaaggagaaagggagggagggagagaggaaggaagaaaggaaggaaggaaggaaggaaacaaagatgaaaaaagaaagcaggaggaaacccaaaagaagaacaagaagaagaaaataaagagagggagaaaaaatattgtatcagaaaagaaaggcatatcagatttagaaagaccaaaaaagagaagaaaatagataggaaaaagctagcctagtgtatacagaataatatataaggtattcacagatctatgaagaggtctcagtcagtaaaaagacttggtgaaagagtgatacacaagcaaaggtagaggaacataacaaaaatgcagttttaatgtaatattagtataaattagctcatttttataacctgatattcatcaggctatggacatgagagagttgttgagttactataagttatcaaaaattctgcataaagatgttgaagtaatataaattttaatatatttctctctcataaaagtcattgaaaacaactaaaacaatgaatatagacagaaaaacatgaaacaagggactggccatacccaaatggtaattatgatacagaccttcccattactaggaaatctaggacaaaatatgaaaaagaaataccatataattctaggtcccaagagagtgtactgttccctaaaagaagtgccataatgccgagagacataaagcacctgtgaggaatggaagcagagtcagaaaatgttactttcaaaagttttgagtgaaaatacgactgaagaagatgatttgctcagtaaatttgggcaagtcaggttctgtcatgcaaacagcacttcaggaatacaaatgagacaatctagtcaccaatgagaaaattgaaagtgcacaataaagaaattgtggccacatgactggtgttgagcaaggaacccatttccatataagacctcgactaaacgatgtaggagctatagttgtaggagagagtataaatgttataggcacagaaatgtaaaagtgtcaattatgggaattagagagatgtgggtgttttttcttcctaacctttcagagcagcaggttaccagatgctgaaactttaggtacaaatttattctgcctttggttttttaatgggaattaacatcttttacaagaaaaaatatataggttttttgctctcatttaattctagaaaagttaaattattttttctttgttttaacataatacaagataccactttacaccatttagagctgcttatgtatttatctactcatacagagagagtcaggtatctgatattaagcttccaaagtgttaatatatttcttaacttggacacttggatttgaggagtatctttactttccttatagtagttttgtctgtagtttgtagaatatatatttatatctacctagatgattgacaggtaggtaggtaggtagatagagagaaatagaatgcatttccagaaagacagatgtttcaaaagcaaaaaaactataaaacaaaagttacagtttcttaactgtgtgacccacagttcatctctttttgaccattgatatactggattgtcatacattagggtgaaattatcacgttgggaaagaaagtgttgtctgtcctatagatatagatctacacttcattgtagcccattttatcatttgttatgtggggatgtgcagctacgtactttttggcttctaaagactgctttgcttatcagcgttatgctgtccataatgacatataactcgccctccccaacgctctcatttttgctccctaatttttacggatggtgaggtaactaagctatatcttcaccctttatgctgctctgcccctgcaggtacagcaagaaacatacatgtagggcttcacccttgttggccacgtaaatgtgggtcaagggaactagcatgagaaagaaaggttatatcctctccaaggaaaaacaaaaagaaagtcatacatagttgttacaatacaaaactttttttttttttttaagacagggtcttgctctgttgcctgggctggagtgcagtggcatgatctcagctcactacaagctccacctcctgggttcaagtgattcttctgcctcagccacacaagtagctgggattacaggagagtgcccaccatgcctggctgatttttgcattttttaatagaaatggggttttgccatgttggccaggttggacaacaaaatattttcttccactctaaaatttatatgcaaatgcccttgggagaagagccatgtagggtgaaattcttgaaaacatatatgtggctaatagccagcattgagagaaaagagatttttttttttaagtatagcatgatgttatatatctggaagatataaagaagacagacaattccaagcagaaaaaatatatgaacattatagaatccaggaatgttggagatacattttcttaatttacaagtggcaagagtcatctgatacagacactatataagtatctgaaagtgagaagatcatatactaacagaaaaatatcagaatgtaacctactaattatacaaatgcagaaaagaacaaattcagttgagcattatgttgataaacattggcttcaagttttattatttacttaaatgatattcctaaagtacattttggagagaaagtttataaatacataggaaagcaccatataaatgcatatattcaaatgacagattgtcacatatttatgaaattgaatttagtttatggttctccacaatacaaatccatctgctataatcttgatgtcagggaccagtacatggcaaaagtatggaggaaatgagatgtttaaatgaaaaatccatgcgtaattctgacatgtcttttggagctcattgtttttagtttattggtgctgttgttttcttatcaacaccttattcctgtgatctgtgttctgatttatccccacatttttaatccatcgaaggcttcccagtcttgtgtcattctgagttagtagcacttagatgtgttactctttccaaggttagcacagatacaaaacctttgaaagtttcaaacagcatatcccttaccttacttttaatatagaattttacagattataaactgctttcatctgtgctctaattgtttctcaatcttcataacaacctggttagaaagaatggtcagttagagatgccaatcaattcttctgccaaactttcaaccttgtacttcatatgccttttgtagaaatcagtccttttcttctgccagagagacagccatccaccacgtggtccaggtctctctccactaccacagaggcttagtgagaacacctgatctcaacggttgctattagaatccctctgctttgttacctgacatcgttttgggaacccaggggactactggggaaacgataacaggctatgtgtaaactagagagaagaggagagcaggtgctggggaagaagtgaagacatgaggccagggtacctgcacagagaaggatgaatcaagctctggtttcactcacaggctctttcagacccctgtttccaacttgcttaacctctgactgaacttcagcttgagtctctcagatgtatcattccagttctaatggtcacctccccctgtctgagctcattaaagtaagtttttcttcctagttactaaaggacttttggttttaaagaaaaacacaaacaaaaactagttattatccccgttttacaaattcaaataatacatatagaaaccccaaaatacatcattaggttctaaagtagcatagctagggaacagtggcacagggagagggacacaaatccatatcttctgctggaacccaacactctttatatgtaattacaccagatgaggtaatatcagtgctgcctttttgaattagcccaatgatggtgcctaaaatgagtttgaagatttgagtcaagttcaatttatttatgctgttatagccagagaaacccagtcatgcaatctcagtatttcccaactaatgtagatcctgaataattttctttcttttcaccttcctgccactgatttttacttagtagatatgtctaagaatcttgtttgttgcctcctcaaagatgtttcctcctatgtattttccctgagtaatttctcccattttaagaatgcgtcatcttctctatcacaccagagggcagaaggttgtggtggtgatgttgttttcacattagttttcctctatttccttcagcagggaaaacacattgcacttgcggtcacataattaataatcacttatcaaaggagtatgtgaataacagatgtttggagagactgctagaatagatctcttgaagtttctacgtgtatctcaaagagaaccacagtccttacctttccttaaaagacaccactttatactagaatgatttataatcctttgggtgtgtacccagtaatgggattgctgggtcaaatggtatttctggttctagatccttgaggaattaccacactgtcttccacaatggttcaacgaatttacactcctaccaacagtgtaaaagtgttcctatttctccacatcctcgccagcatctgttgtttcctgactgttttttttttgagacggagtctctctctgttgcccaggctggagtgcagtggtgcgatctcggctcactgcaagctctgcctccgaggttcatgccattctcccccttcagcctcctgagtagctgggactgcaggcgcccgccaccatgcctggctaattttttttttgtatttttagtggagacagggtttcaccatgttagccaggatcgtctcaatctcctgaccttgtgatccacccgcctcggcctcccaaagtcctgggattacaggcgtgagccactgtgcccggccggtttcctgactttttaatgatcaccattctaactggtgtgaaatagaatctcattgtggtttgatttgcatttctctaatgaccagtgatgatgagcttttttttaacatgtttgttggccgcaatccaacccaaatggccaccaatgatggactggataaagaaaatgtgggacatatacaccacggaacactatgcagctatagaaaagaataagttcatgtcctttgcagggacatggatgaagctggaagccatcattctcagcaaactaacacagaaacagaaaaccaacactgcatgttctcacttataaatgggagctgaacaatgagaacacatggacacagggacgggaacataacacaccgtggcctttcatagggtgaagggcaaggagaaggagagcattaggagaaatacctagtgcatgtggggcttaaaacctagatgacagggccgggcgcggtggctcacgcctgtaatcccagcactttgggaggccgaggcaggtggatcacgaggtcaggagatccagaccatcctggctaacgtggtgaaatcccgtctctactaaaaatacagagaattagccgggcgtggtggctggcgcctgtagtcccagctactcgggaggctgagacaggagaatggcctgaacccgggaggcggagcttgcactgagcccagatcgcgccactacactccagcctgggtgacagagcgagactccatctcaaaaaaaaaaaaacaaaaaaaaaacaccctaggtgacaggttgataggtgcagtaagccaccgtggcacatgtgtacctatgtaacaaacctacacattctgcccatgtattccagaacttaaaaaaaaaaaatcactaaagccatagtttccagtttaatttttaaaaattaacataaaaagacacaaaagacaccactgaagttcataattgccacgatgcctttataccacagcttgctcagataatcactgtaggctggtgtcattttccacttcctgttggccaggaggaagttctagtgataagcatgacgccaacctcttccctagctcacacttacatacacatgtccccctccggaaacgcgctgggctgcctcttacaggctcccaggcagttcagcaaacagtaaaaccttattctactcttgagaaatctattattcctgctactcctagaaagaaaatttttccctttttcccactctcaattctcttgtctctgagttgcatttataaaacaccttctttccctctgctttttctttgctctcctctttttgcctttaaatattagaaggatctgtcacaactaattaaatctagaactgcagctgatatactataaactgggaacggaaccacagcgcgtccatgagggcattgtctgtctgtgtggcctagctcctcctgctggtactcttctgctgtctctagtccgtgatgtactcctttgttacacatggcccactcatgaccgcccgaatcagccacagtaggcggtattcttaaccttaattaggaagctttattcttagaatataacatcaaggcttaaattatgaagtagactcaagttcccaattgatgagattctgccctatttttgcagcttccattccaatatttttcctctttccctttgccagcctctaccatgtagtactttttaaaattttctccttttctcactcacaggtaattcattattacttaagtatgaagtaatcggtgaagtgatacctctcaggacgatttgccttataaaagcacatccttgggagcagaaaaattcaaagaactggtttcctaatggggcatttcaggatatttgacattcctattttggctggtcatacttcttcatcttcaattggctctcctggaaacacctgctgattttgtcggctctgaggcagtgctgagcagtaaaaggagagtggcttgtcttcatgcctaactaagttccagtactgagctgaccaaggacaagcatgggattagcaaattatttaaatgtattatatcttggtttcctgatttctatgattactatatctgaaccaggatataataatgataaaggatataatatggaataatttgtcatctgagtcaggaacttttgacagtgaaagagagtatcattaatagttacacaaggataatcctgaaagtatggtccctctacttgtagtttaaaataaaatcagttatactgtttagcagagctaccgtgaaggttaaaagaaacaatttacacaaactatgttgcattgaaatattagtctctttcccataagttactcccagcttctaaaaacaacactatagataccaacattttaaaacgaggattgaattaaatacctttgtcattacaaagacgatgcctccttaaaaatttattgtttaaatttgtgtatttgccaatgtatgtgtgttttcccccattatcatctaagacaaaatattatcataataatttaaaaattagtaaaataacatttttaaaactttcagtatttttggggtgttaagacttacagtgacttaaatattctgcaggacttttcacctcaaactcctttcaatttaagtgaaagagattatgccagtgatttttaagtgttgttttgttcttattatcttaatgttgtttgaatttgatctcttagaatctatatatcttatagaaactaacatgtagttataagcctcatataaaaaattgttctggacattagggcgaataaaaagtatcacctttgttttccttagcccaatatattctatcttttaaatacaacttttcaaagatttcttctgaagacctcacagatttcatatccacctccccaaatgaatgagagtttccatctaactggtattgtgaattttaatgtattcttttttacttaattctcaaagataaaccaaaattttggcttgactgggagttttataaaattaaatgtgtaatacaggaatatgtgtatcattgacacttgttataaatgatagaatgttgaaagcaaactcaccaggcaatgactcatacattttgtttgggcatacctttttaaattttaaaatagtattgttatttttcaaccattacactcaattttaaaatgttggtatttcaacaccttgtttttgttttcttcatagaaatctgtgctaggttttgttgcaatttccatagagcaatgcgtcccaaagtgcatgatgttaatatgtgtggtgaacacacgtatatacatacaagtttccataatcaaatcagactggacagatcttgtgctctgggatcttcttttggagaatcacagatcgtctttatcacagaacatctttaaggccagcagaatacatttccactttgggatttgcttttataaaatttagctaaacattgtgcggatcacgggctttcaatggggtttctttaatgtacttagaaatatagtcgtatctcccatggtttcactactgtgtttctgaaaatactgattataaaagttctttgataataagtctagtgatttttagtttaacagaatgaactagacttaattagagaaaggggaataaagataaaagagtttttcaattttggacttttgagatgaagaattttttagttaattatttttaggaagttactattttcccctttgtgtaccaaattctatatatcttaatatttgctattgagaaaatcatgtactggcttaacatcaatgctatcacattgatccctgctgccgcctttgaaatggctctggaatattaattttctaacactctctttagatcacaacattaatagctgactgtctaaaagagggggaagtttgcgaataattcattattataatatgtttggtaattttagtttaaacacaatactgaaaactatcctatttggtactggccctataaagtttaggacatatgggatgggataaccacatctgaattagcaaatcaatgtatttaaacaaacaaacaaaaatttaagaagatgtgaagaatacatatacctttgtaagattgttgatatggatctagatttttcgttacccataggagacatcttgggccacttcctacttgtgttcaattgccaaaattcctcactcacttctataatgagaaattttgagtggacactctctaggaccctgtcgtcactgaacgcccgttgtgtagccaagaaagatcataattccttggtcttgatcttactgggctcttacagattcttagtggtctggaccacacctccctctgtgcgtagatatcgtttctatgaaatttctggagaatggtcaggatatctaggcaaaaagctttatcaaatatttacacactgaatttttctttctaaaccattcaagaatataggcaaaatgtgtttacgagaataatcatttaatattcctttatccctttgctttttttttttttttcttttaagacaaggtttgtcacccaggctagagtgcagtggcatgatcagggctcgctacagcctccacatccttgtgctcaggtgatcctcccatctcagcctcctgagtagctaagactatagactcgcaccaccatgccctgctaattttttttttaatgtttgtacagacagggttttgccatgtgtgtcaggctggtctcgaactcctgcactcaagtgatctacccaccttggcctcccaaagtgctaggattacaggcatgagccacagagcgcagcctatatgctaactttattcatagagagtctttagtatttttcacatctcaaataaggaggtggagaatttttgtgaatgatttctaccatcagaaatattcattttaaaaataaaattcttcacagcctgaaagcactttcatgctgtacttatgcaggtttgactctcagagaatattttctaaatgtgtgaacaagtacataaaatattatttactgcatatattattctactaattgtaaatttcaaatactcattgcttatatgtaggaatcatttgttaaatcaagagttaatatttgctggtacttttcttgttccaaaaaactatctcacaaattgtttggtcactgtcgtagccaattggaatctagactataatagcagatgagtaacaacaaccaacgcaattatcatcataaataaactagaaatttaaatctcatttttaaaaatgaatattcagagtcattagagaatggccctctcatatcaacattctttcaacacttccaatattgtagaacagagaccatgaggataatgttgagctgataaagcatgcctttcttatctcaagatattatttcacatacatggctttcgacttgtgctggcttttgggtaacagaatacattgtatcggtccttaacactgtatctggctcataagaaatacattctgtaacccagtagaagcagtgtagcctacaagaagaaatgaaggccaggaaagaatagggcaagtccacaagtagccgtttgggaagctcacatcagctggttggtgagtggcattgaacagagttcattcaatagacaagtttaggccataaaaaaactgcacctgtaaaaactatagttcaaacctgaaaattacaattcctctataccaaatgagtgactgtatttttcaatatctactctcctgtgattaaattccatgcttttgtgactatttatccctttttctttattttacttattaagaggcagaccaaattatttccaagacaattgggaggacttaatctaataatgactctgttagcaaccggctcaggtcatacttattaaaatgaacagacccttctcttaatacccttagcaaattagtgactttttcacatttttttctttcagaattaagaaatatagaattgttcttttatatgcatgccttgcaaaagtaattctaaaaaaattgtcactaataagaattcaaagcagtgtagcctttgttagctgccttttctatacaccaagaatgagcaatcaacattgtttactcatcctcttgctttaaaactcagatatatgcttgacgcgaatattgctgacaataaaacatgacatttaagacagtctatttttattgttcttgcctctttaacatcaaaatgtaaacacaaaatgtagaaagatttcttccccaggttttcacccaaaggtcattttattttatttcccttagctattatgattttcttagcaaggtaaggaattcatgttgcttttattttgcttggttttcattctcagcaacttttgcaatgtatttcctttgcatctgtcttctgctttaaaattgatagacaatggtatctgtttgaactgcgggtccttgtctgcaatatgtctgtaaccaccacctcaccagacatccacaaccggaaagactcttctgcctccaggatgaattattttgcattacaaggtttgtgcctgagcatatgtatgaataatgcataattaagcgtgttctataattttctctagccagtgtctggcacatacatatttggatggataacgaattgggttttgttttgttttcaaccctctgcttagaccaccaaataagtcttataaggatctactcttaagatgatgaaaagtattgttgacttccttactcttcctccctgagtgttctagagggtggaagttaaaatcacgtgcttctgaggtgtacaggcttctatggtactgtgtgcggaattggtgggtttttggtctcgctgacttcaagaatgaagctacggacccttgcggtgagggttacagttcttaaagagggtatatccggagtttgttccttcagacgtccagatgtgtctggagtttcttccttctggcgggttcgtggtctcgctgacttcaggaatgaagctgcagacctttgcggtgttacagctcttaaaggctgcacgtctggagttgttccttccttctggtgggttcgtggtctccctggcctcaggagtgaaggtgcagaccttcacggtgagtgttacagctcataaatgccgcacggacacaaagagtgagcagcagcaagatttattgtgaaaagcgaaagaacaaaccttcccccgcgcatgagggtacccgagcaggttgtcactgctggctggggtggcctgcttttcttcccttatctggccccacccacatcctgctgattggtccattttacagagagccgattggtccgttttgacagagtgctgattggtgcatttacagtcctttagctagaaacaaaagttctccaagtccccaccagattagctagacatagagcactgattggtgcatttacaaacctttagctagacacagagtgctgattggtgcgttcacagtcctttagctagacacaaaagttctccaagtccccaccagattagctagacacagagggctgattggtgcttttacaaacctttaactagacggaaaagttctccaggtccccaccctaccgagaagcccagctggcttcacctctcaatggcactggccacgggactttgtggcacctagcccaggcactccagcagcccagagggagcttgtcccccaaacaagcccagcaggcgcgggctggccaccaagccggcgcccacctggaacccgtgtggcctgagagcagagggagcggactcttgcctctgccagccccagagggggacccccacagcacagcagcgggctgaagggctcctggagtgcggccagagtggacgccgaggccgaggaggcaccaagagccaggaagggctgctagcacattgtcatttctcagtactagagtcatagggattgctagagactcttctcgtattatggtaaggtcatatgttctcataggatcatatagaattcccagaggaggatgattaaatttattccaacaagaggctaataaagcagaaatgatgacttctttactgttgaagggctggcagtccacaaaaacaagtgccaagaaggccaaaatagcaaaggatgttaccactgcccccaccacatttatattcccaaaccttccacacacctacattcacattcaaatagtattaaagtataagcacttctcattggtcttcaggtttttttttaattagatagatcagtcttcttaaacagcattaacatgtttaagcttcctgtcctttggtagtgacttaagttgtcaacttccttaaaagtcattactgacggcaaagtatttctttttggtcatttcaagacatccacgtgtttttttgttttgttttgttttgttttgttttttcgtctatctctatctcagaacttataatgaagtattgtattgtagacttatttttctgaccccaagagactgggtgggtgtcacctgaagacatgtcctgtgtatcaagtatccatgaatacttgacatacaggatgatgccaagaacagagctgatattcacaaatgtagaaataaatgcttgtatgtacatattattttatctgatccttacaaaaccctaggaagaaattcagaagttacaaaactcagtttgatgaataagaaaactgagattcaccaagtttagattcttgcctaaggtcacagctaacagaaactggatctgagtatttgaaattaagtcttctgacttcaaaataattcactattctgtcctccacttgtcttccctgactttgtgagaacttttcttttggaaaaatttgaataatatttgagttggttataaagcataactaaagttttcccactggtgttttagaacacaaaaagagacatttctctttcatttctgagaagcgtatattgagtagattttcattcagaatgcctttgtgatttctttgcatgttttttaatctgttttaaataatctgaaagtaaaagaagttattttaaatatttgcatataatgatgtatttgttaaaagcatatctttttttcactatactaaaagcctagccaaaattgaaatcaatttagtctaatttttgaacttgtattatgtggggtggcaggcaaaaaaaaaaaagacaaacctgtactctaaatattatatatgtgggaaccagtaaagatttgaacagaacaatgagaccaacattctctctaccagaaaagaatttaaataagaaaaaactactgatatgcagcaccaatacgctagaatctgacagaagctgtatttttaaagtcactaacactcttaatattcaaaacacacctgggaaaaagcagtaagtcagtacaaagtgaaagaaaatgaataacaggagtaaacctcaaccacaaaatataaagtatgtgaggcctactagatatgccgtaagtggatctacatttagtgtgagatgagaacaatctggcatcaataataacaatatcccattgtatgatcattatcaatcactaaatgctttcttccctttcaaataaaggattcagcattgtgacattttgcctttcattttgttgttgtttagtagaatgaccatacttcctggaaaactagaaactcccaagggaattgattcattcttttctcccaaacttctttctatcaagtattaaataaagtaaagcaaagactcatttgaccaaatctttcaaagttaccattatctaccttctctatagattatttaagacaatcattgatgatggaaaataattttctaaagactgtttccaagaagcacaaaatacttttggtttttaattcaaaatcctgtatttgaatttcaacaattcaaacaagaaattggaaaccaaatattggtattttgtacaccaaactgtgtttgttggtttcattcccaaagaaatagcactaactaggaagagaagtatgagttttaggctttcaaatcgtggccatcaggacttgagaggaaatatgcaggtgccccagttttagggatgtttattggatacgtccaaatgatgcaacttcagcaaaactatcttatcttcgtgatttggtcagtgatttttttttttttttttgtaagacggagtctcgctctgtcgcccaggctggagtgcagtggcgcgatctcagctcactgcaagctccgcctcccgggttcacgccattctcctgcctcagcctccggagtagctgggactacaggctcccgccaccacgcctggctaattttttgtatttttagtagaggcagggtttcaccgtgttagccaggatggtctcaatctcctgaccttgtgatccgcccacctcggcctcccaaagtgctgggattacaggcgtgagccaccacgcctggccgatttggtcagtgatttctatgcaggggcctggagacaggctttgagtacctcagtcttttttttttttaactttaagttctggggtacacgtgtggaatgtgcaggtttgttacacaggtatacatgtgccacggtggtttgctgcacccatcaacccgttatctacaatagatgtttctcctaatgctatccatcccccagcccctaccccctgacaggccccagtgtgtgatgtccccctccctgtgtccgatgttcccctccctgtgtccatgtgttctcattgttcaactcccacttatgggtgacaacacgtggtgtttggttttctgttcctgccttagtttgctgagaatggcggtttccagcttcatccatgtccctgcaaaggacatgaattcatctttttttatggctacatagtattgcatggtgtatatgtgccacattttctttatccagtctatcagtgatgggcatttgggttgattccaagtccttgctattgtgaacagtgccgcaataaacatacatgtgcatgtgtctttatagtagaatgatttataatcctttgggtatcagtcttaatttagcatcttgtggttccaagtgagaagtttaggtagacagacccagagatgccaatcagaactcaacatgctccttgcagcactgggaaagaaaacgcagggtggaggaagcacacagtcagtggttatgacagagataaagaatgctgatgctttgttacagcttcactttcatgtatttgtgagctctttctaacttttccttccactgatatgacatacatttggaaattatcagttctcctcagcaatttatcaatgaaatggcaaggattcactaaggagtgataaacaggcaggatgttttgtcaacagcctgaaatacgttaatcagcttctggaatgccaacaatttaaattcaaatagatttctcactgagcctgagatctaaaaccctgtgatgctgtttctgtttattggattaatgtagattttaggttcctttgtcctcaactcttgggaatcccccctactatttttttctttgtttggatggcttagttggaatagaaaaaagtgtggttgatttcttcagaagtgttatctgtgtgacctcatactcaactgcgggaataacagaaaggcagaaatcgggaaataaaaatcctgttgccgaatgagaattctacatctcactgccgtttggaatggtacagtgattcatatttcaggcacctcaattagacattcattattcataaacacttatgtaactctgagttattcaggctgggagagaacattgcaatctttctttttccttttctttattatatgacatcttatatcaaaaaaaaagaaaaagctaaaaaaaaaacactctgctacatgtaaatctgaactatttattttaggcaaaatggcatgaataaaacaaagctgatctacatttggctttgtcttgtcaaagaagcaatctgaacaaataggctaagatcaattctattagaggtgaaatacggaccaagataccaacattgatcccttcagccatggcccttgcatatagttccaatgtacaataatacaggtcaggacctggaaaggcctaaatgataagactaagtgtcaaaatcagtgttgaaaggctgctcaaactacagaaaatgaggtatccaggcatttaataagcatgcattgagctaagcacataccaccactaaagattcatttgcatgtgggattaaaacatctgaaaagttgacaagggaacgttttagagactctgagatggtgacatcattatgacacaaggcactgttggtctgaagcacactggtgagtgtccccaaccataaatttggagatagttcaggtggcatctgagtattaatcaaaagaaaatagatacttgtcttactcgatgaaaataataattattttttttgaaggggcatcaataatttaacaaatatttgtggtttactttgtgttcagaacatgttgtagtctatgtcagcactgtctggtaaaatacatggtgagccatatatgtaattttcaattatctaatacctgcatggaaaaaaactaaaaagaaacaggtgaaatacattttatatgttttagttaaactaaaatattgaaatattgtcattttgttatgtaatcaatataaaaattatcaatttgctactttacatttttcatactaaatttttaaaatctggtgtgtatgttacacttatcttgattcagaaactaaatttccatcagaaatacttcatctatatttaaatttcacaacatttatggtttaaacactggactcacatagccaaattgctcccaaaatatctaaaatgttctcctataaatgaattatcagttttaaaatatacatttaaattatttaaaataaaatagcaaatttagatctgcagtctctcaggcatgtgttagtccttctagcaacatgccaagtctgagtagccacaggtattgacacctgcacctgtgggaatggtgaccctggggatgtgcagggtgtaatcatatgcagtggcattaatctttggggagagtcagaattcatttatagcctggtggtggctaagagatggcagaattataataactgaggaggctaagtacttaacatcaatttgcagggcagtctcattttatcaggaaaagcaagaatggcagaggcaagaatgcgatagctgttccttgacattggaaaaccttcagcaaaacccagggtttgggggttccccctgggtgtctgaaatgtagcattcagcactagctccagcctttgggcagctgtgggggccagagaccaagtgtggtccctggcccagggtgggattagacagcataagtggtgtcaagaagtatatgttagagttaatgaagagtaggcagtatgtggatcacaactctagggaccatcaaataaaacttctttcagttaaggcattttgtttactgttaaagaagacaggactctaggatgtgtcttacttttccagaacatgttacaaactgatgtttcttgagattatgttggggtatgctcagccagtctctctcaccgggttctagagacagctgctgctgattttgagggtaaaaatctagtattcattgatctgaacagctgaaagcaaatcccttttgatgcaatcagattgactcaaagcattagacattttctctctgtgcagactaggctaaatgcccttggatagtctgtttcatgggcttagccttagcaatatggacctggattaattactctggcattgtgtaaactctgtaactatgtagaaatagtattatctcctatcatatctctatgtctgaacattatatgcaaccttctgtttattatcacagtaaaaaagtctgtccaaatcattgtatatgcataatttctattatgtttagagggattgatgattagaagttgataggaagacattatttaataattacaagagaatgcattctttaacaaggataatatacctcattaaaaataaaaatcattgaattatttctctactgaaacatatcagtgtcagaaataacatgaccctaaaggatatcagttgtgaataaaagccccaaagtggggattaaagtattaatagtcatgggggtaggtatgattttgcagaggtagaaactgaaatacagataaataactttcccatggtgtctgttgtatgtagtgaagccaggattaaaaaactaaggcctatctaactgtgttttttcataatgaggtactaactatgatacgaatgctccaaagctgtcaaaccacgagaggaataatgtattataccgattattcattcagaaaaacaatacaagtacttcaaagtagcaagaatctactctaaacaccattttcacaggtataaagcaaaaataggatttgatctttgaaaatatctattttaaagaatttagtatattgtgcttttatatcaattatgtactgccttaaacattcatcaagttctgctctaaaatgcagcatctctgaatatgacctgcagcttcatatgctatagacagagtagtcagagaaagtagaaagcaggggcacccattgcctttgaagagttttcagtgaaaaatttaaagaaaaaacgctaatcacagacataatgtaagtatatgaatataactattttcccctaaatctgaacatagataatgcaacataaatctcatgataaagagcaatctctaccttatatagcttagtggagaattagaatataattagtaaatgttgaaaataaagatcaactatgttgatggtattttaaaccattcagttctgtatatcgacattttgccaacactatgctaattctatggctctctttttggccctgagtttacttagtattctccacagtatactctgacctcgcaaatcaacattcatggtacaaaacattaaaagtacagaatatattattgttaagaagaggattcacatgtaaagatgacaatgaaagtgttcctggggaaaactagcaagggagtggaaagtgggatggagaagtaaagtcagtgtgccaaatgtcatggaatgtaaccttggctcagatcccacagggaagctcttgagataagtcacatgtcacagctgtctgaagcaggggctagaagctggagactttatatgcctacatctatcagacgttggttacttttcccaatttcccaactacccttatgttcaggcaagatgggttctggcagcctgagggttgtccgcagacaaaatcttatggattctagctattatttgataaaattgacatgttcacaccttatgccccagcaatttcaatgataggaagacatcccagaaaaatgcctgctcatgtttatgggaagatgtgtattaaaaatatgcagagaagcagtgtgtattgtataataacccgaaaatgaaaacaacttaaatgtccataaacatcatcactgttcaaagcatatgctacattttatataaagaaatacaatttgaaattcaaagggaatacacttcaagtaaatacacatgaaagaaaaatcataatgttgattaaaataagtcatagaagaatacatacaatgtcatttcacttacataaaatccaaaaacaggttaacagtatatactttaggaatatatgcatatatgataaaaccagaaagaaacagaaaggcatgctttattgaaagtgaaggctatcggttacttctaagttgcagggagggagatggtgtcacaggaccaccagatttgtatgcttgctgtgcagtaacagacaaacacactgagacagcagggtttgcaacagagaaagactttaatgattatagggcagctaagcaaggacatgagaacgaccgtcacatccatctccctgaggagttctgggctggagtttttaaggggattgtggagggtgagcggctgtaaaattggggttttgattggttagggtaagagtgatgaaatcatcttgatgcggaaactgaattttttgtcagcttctcctggggtactttggaccagctggtgtcagtaattccacccatatgtaggagctattgtagatcaagatatgaagataaagaagatctagcttctgaaacgcagttctataattaaagaagtgatataacggtatagggacttagagggccgactatgacttcctaggttagaaacatagcttggccacttaaaaactgaataacctcagtagaacctcattgatttcactgaaaatcaacttccttatctataccatggaggtaataatgctgactaccttattcactttgtggggattacataagttaatacatgtaatgcatttcaagcagagctcagaggcaagtgaagcactcattaagaaaacattcttggccgggcgcggtggctcacacctgtaatctcagcactttgggaagctgaggcaggcagatcacgaggtcaggagatcgagaccattctgtctaagaccgtgaaaccctgtctctactaaaaatacaaaaacttagccaggcatggtggcgggcgcctgtagtcccagctactctggtggctgaggcaggagaatggtgtgaacccgggaggtggagcttgcagtgagccaagatcgcgctactgcactccagcctgggcaacagagcgagactccatctagaaaaaaaaattctttttaattatacatgattttgattgcactgaaaaagggtgggccagttgcacctgtaagaaaaatcttattagttttctgttgggactactgagggacacaggatggaaaagcactctgaacagacaaattggcatgtgtgcaaagcattgaattacaaaataacaagggaaaaggtgttcaagggaaagtgatggagaagattgtatgggaggtggcaggagacaccttgatatcatgtggggctgtctgataaatttgcattttgtcttagagctatctgtaattcttaggagattttaaacatggaaatagcatacagactatttcactaataaccaagtatgccttgtggaggatgaactgaattaggacaaagttgttagcaaaagaccactaatagctgtttcaagtgaaaaatgttgatggatttaagtaaagcagggtagaagaaaaagaaagcagattaaacagatatttctgtagaattaactatactccataactgactgacttcagagatagaaagatgctaaattatgctgcagaacaagctaccaccaaaatctcactgatttacaaaaaggaaggtttagttctcactaagatacgtcctggcagctgcagcattcaaaatgtatttgtttgttcattaccatttatcatctctttctctgtcactgttgacaagatagagatacaaagttgttcaaaaatatttcaggtgtaactatgtatacatttgttacatgaattatcacaaccttaaatcttttatttctattgtcttaaccatttttgccacacagaagctattcatatgacaattaagttgatatttttggccgagtgtggtggcttacagctgtaatcccagcactttgggaggctgaggtgggaggatcacttgagcctaggagtttgagaccagctgggacaacatggcaaaaactgtctctctaaaaatacaaaagttagccaggtatcctagcacacgcctgcggtcccagttactcaggaggcagaggcacaaggatcacttgagccggggatggggaggcagaggctgcagtgagtggtgatcgtgccactgcattccagcctaggtgatagagccagaccctgtctccaaaaaaaaaaaaagactttttttgtggcagtgtctcaaacagacacaatctgacataatttagcatgttttctttatttttgacacagggtctggctctgttgcccaagctggagtgcagtggtgtgatcttggctcactatagcctctgccttcttggctcaaacaatcctcatgcctcagcctcctgggtagctgggattacaggtgtgcaccatcagtacctagctatattttttggtacttttagtagagatggggttttgccatgttgcccagaatggttttgaactcctgggctcaagcaatcctcctccctcagcctccaaaatgttgtgattccaggcatgagccactgtgcctggcccataatttagcacttctatcaaatgcaattatgacatgaaatatttctggttaacaactgacaatgtaactaatacaataagttttatttacattttatgggcagattttttttggtgcattctgtagtcatgaacaaattaaatggtcattatcctcatggagattctagcaaaaagcaaattataattacccacattttcatacccagctaagagtcctagaaagcctccaacctgttctagccattttctcatatttgtacagctgcaaaaaaaatatttttgagtacattatgtgagctaaattgtatttcaggtggtagagactatagataaatatcctctttcatacaaactaatcctttcattttgatgcattatttttgaggttcatatgaaccacaaccacatcacttgaattgatgtattggaaatgtgataaacattgtgtccagactgtatttgctatttattagaacttacctctccttgtatgaaattaagtatttgttttagatcaatttctttgagttgctttcttttttcttttttaagtgaaatagaaaatgaagtctgtagaatctggggaccttcccttgactaaaaatgagtttccatagtattaccataaaatctatggtaacccatttcatactgaaagattcttgattgcttacctgttgatgtcattccctaggtgacgtctccttaaagacattattgtatcccatttttatttgtatacacagcatctaacatcatgtccagcatagaatatgtgtctaataaatgttggttggttgaaagataattttcatctgcagtttctttatgcacattcgagtttagtatcttctgaattattgttttgttttatatatgacttacatgcacattaaagtaagaaattttccaaagagcttgagtagcgctaagattggtcattttcaagcatatcaaaagacaatgagtgaaaatactgtagctatactttattactctgcaagcgtatgactaaatgcagctgactcctccacacaaaattaccatagtggttaagagtgagattttagcctaatacctaagtctgaacctttctctgctgctaactcattgtgtgatttttgtgcaaattacctacatttctggacctctatctcttcacttttaaaatggggatcactttgataattgcacctatctcacagagacattttcaagatcgaaggagtttaatagtgtataaaatttagtaaaattcctggtacatcataattgctatgaaagattggttatgggactcaacaaaatctgttaaataaaaaaagtatgaaaatatgaaaatatataataacatagtaacatactacaattatgaatatggactcagttctaattctgaatagtagggaatgcatttggaattattagtaactaatatgatatattcttttgtaataactatatttttccatgcttaggtactgatcactcaggattctagttgtgaatgatagcagcaacactagctattcaaacagaaagagatttattaaagggacttttttactgaagtttctagacagctacaatcagatttgaaatgccaccaccaagaacaacacctacatctccccagagctcctcagtgaagccagcactgctatacccactgctgtagatgcctgatgattctggcactgcgtgccaagctgcccggggtggcctgggaagaccagctggctctgaccctagccttgtcagaaaatcagtttggcacagaaattgctttatctctctagaaccaaagtcttgtgtttttctttctgttgggcatttaagtcaaatacctctactctagctgcaagggaagctgagaaaatgaacttctgaaattccccaaaatatgcaggttgttcaaagctgctccctggccaccaaggtgtcctcaggcacagagacattaactagaagaggattccttgagcgccacaaataagaacttatggggccttatttagttgacaggggtgaacagtacctggaatatcagttgtaaatgtaaggagaattctcacatagagtttaaattgcttaactatattcaattatttcaaaaacatgaaacgaattatactagatataatctcccataggatttactgaggaatacagagaagagtaaaacaccctgctctgattcttacagtgagcaaagaaggtgtcaggagtagagaattttttcccacatgcaatgtgggaaaagtataaagtaccctacagatgcattgaaggaaactcctctctttaggaagaataaggagagtctgaattgatttgctggttaagtgtattggtctgttttgcattgttataaagaaatacctgaggctgggtaatttataaagaaaagagatttatctatacaagcatggcaccagcatcttctcagcttctggtggagccttaggaagtctttacccttcatggaggatgaaggggtgcaggtacatcacatgatgacagaaggagcaggaaaaaggaggaagtttcaggctcttttaaacaactagctctgacatgaactaatagagtgagaactcactcagtaccaagaggacagcaccaagccattcatgagggatccacccccatgatccaaacatctctcactagacgtctgagaccatctccaacatttgtggccacatttccagatgagatttgcaggggtcacacatccaaaccatatcattgaccaaacatttattgaatttcatattaccaatgaaggtacaaattaagtaatatatgttccatggaattattaaactttctccacatgttgaaagatttattcaggcataaaaagtttctatttccaagaaaggtacgtaagtggaaatatatagagaattttcagggaaaaatatgctttttaatttgactaaaaagttggttagatccagaaatatggtgggttctttgtgaatgccataataaagaactgaggcatgacactcattttattatttttaattgtttttccagagaagaggctgacatggttaaagtgtgttgttaggagatttccattgtcaatgtggtacagatcaaataaaagtgagaaagctcttttattataccaaatagcagatacggtgaattttaaatgcttcatggtaaagagaatagagtggaaagtgagatgcagatgacatagattctatggttctagaataaaattattaattttaatgaatgtgtggagcaagacagatatgaatctcagtgaccatgctggaaggactgtggtgttatttacatctatagaaacatgatggaaaacacattctggaatttagaaaaaaatttagatagaattgttgtgttgaatgaattatatttgttttctgttgctggataaaaaattaccataaattcagcagcttaaaacaacacccacttatcaactcacagttctataggtcagaagtccatgtggaccggactgcattctctgatatgggtatcatgaggtggaagtggatgtgttggccggactaaggtacttggaagctctggaaacagtctccttttagcgcattcagattgttgacagatcagtttcttgcagctgtagaaatgaggtctcagttttcttcagcaatggaaaaccccccttacatcaaatccctgtcttgatttcagtctttctgatttctgcttttgctggcagtttagaaaatcactgcttattttattagattagggatatgatttggctatgtgttcgcacccaaatctcatgttaaattgtaattcccaacgttgggggagggacctggtaggagatgatcatggggggcaagatttccaccttgctgcttttacgatagtgagtgagttctcaggagatcaggttgtttagaagtgtgtagcacatccttctttgtttcctgtctcctgctccaccatggtaaaacacgcatgcctcaccttcaccatccgccatgattgtaagtttcctgaggcctcccagccctggttcctgtatagcctggggaactgtgagtcaattaaacctcttttcttcataaattacccagtcataggtagtttgtttacaggagattgagaacagactaatataaataggctcttcagaatactttctctatcataaggtcaattgattactagacttagacaaatagtgtgcagctggaagtgctctctggaacttggaagaggattgaagtaagagatatactctgaagagtgaattattccagtagtgctatgaagagaagtgactgacataatcaatgaagattatattgagaagcaaaagtgaaaaatctgagatcttgcaggtaaaaaataaataaataaataagtcttagtgaaaagatctcaatttcatttatgggagtaaatgccaggaattgagagcgggaggtaaaatatgtattgttagacttgaggaggtcatgattcttgaagtggaatgaacgtgcacgtctaaaacacctaaaagtaacgggaaaataaaagaaatgaagaaagaaaagaataacttcccagatatctagcaaaagggaagcaatagaatacaccagctgagggacttgtaaggaacacatcatctgaggaaacgttcattgcagtaaaatgagaagatggaatgtgaataagataaaaatgcaaattatgtagaaagcatagttgcaagaacacagggtggactagagacaaaaagggcttaggaggtaaagaacaatcccctagtgcacataatctcttgttttcatctctttgccttggatcacgggccaatcatgacagcaatggtgcattttcatctttgaatccatgacacattgttggccctcaataaatttgcattaaacaaatgaaaagcaggtaaccagaagcgatctgtgcctacaagaggagctgtgtgtgccaggaattagtctagcaggagcttggtagattatacttcctggaaatatagatgcatataattttaaagatataatcatgaaatattaaaagaattgtaaaagtggcagtgaattatttagaaacagtgtccctgcatgcatgatacaatattcagatgtgtgttaaaatgtatgctccaaggaaagtcttggtatagttttatgtgcgctgcatattttcaaataatgctggaaagcagtttaaagcttttgaatttcttcatcccgttttcctgtctccttgtagagctccctttgatttcaaaggtgcttcattgctagaatgagaaataggtggtaggaaagtttaattctttgaggctaaagtttgaaacagtttttcatttacagataaaaattctacctttggacttcagcattgttcagttttccccgagataaatccgtagaagtagcctacacctgcctacaccttgtgactacatcttcagattatatatatgcaggcacagttttagaaatgggctggcaaaggaagcaagagggaacagaagataagatgctcccctcctctgtaaaagagatactgtaatcatatgattgtgtttttagccaccgaaagcaaaaaccgactgatattacctttagatgctaatgatttatttgatagaaatacatttttgctttaagcttattgatcatgctcatttataaatgtaaatttattctgtcatcaggattccaaatcatttaaaacctacaaatatttattgaatgtttcttgctaaactctgtggttggttttgggaggatgtgtaaaatccaacacttgatctccagggattttcatcacctaggaaggagagataaatacattttctttttgaatggaaaactaacatagcaaaagaaacaaaaatgctataaatattcaaagtatgagatgttagtcctatcacatcctttgttgtatgaggataaatataagtaaatataaaaacacttatatacatggcagatatcacttggtattaattctccttcagctcttggaaaaataaatcttattgaagagccctataaacaccacttctcactacacttactgcataattttagaaagaggtttaattaacatgaaatagctacactcaactggtctaaagcagctgtgtagcgtgaaagtcacacaaagccccagtctcaatgatgtattcctcttcccacctcaatcatcataatccactttctgtggtactccagtaagttcagggaggctttctttcaatactgcaagtcctcattgtcctcctcttaattctcataccttttcatttcagaattctctcttggatctttgatagtacttgtaccacctactggctcaaacatttattttagttgctctgaaagcacaggaggcgaacaagaggcaaaagtggagactttgggcatagtggccattgggtttgtggcagatttttctggcccatctcagtaaagaaaggaatcatagtgtttggggtcttaaggagaggacaaggaagatatgagccaggtatcagcatcagagagaccatatggccactgaaatctcaaactggatcatagcatactgacagtgcttacatggcccgcattccttgaattctgaaccctcaagatgatgaaacatggagaaatagctgatgtaaacttataaatacataaatcattaggcatagggtaggcctctataaaattgatagttgaattgtgactcatcacttgggattggtgggttacaaatgtgtaaagcctcaggatttgctctctgttttcaccttaatttgcttatttattaaatatgtagagagcagggatgaggaaccactagcctgggagcaggatccaattctcaagaagaagtaattgtttattatagagaagtaaagtagcagaatgaaagaggaaagaaggaaggaacagcaagagggagggatggatgttaatttgccccacttgggtcaagtctaccactctctactccatgtctataatattaatctctgtgtcataagggaaggttctgtgactggcagccacaccgtaactagttggaagagttgtccaaagcaagttagtttgctccttctgaaaaaaggagagcagttgtagaaagtttgcacaatgaaaaaagtttatatttatttgaactgttgtattagtcttcctattattaacagagactagccaggcagcaatatttaactatgtgaataataaagaccagaagtcaattttttttaaagaaaccatagctggccagaataattaaagctgcatgttttcacagtttgaggttctgttaagtcaggaattaagtcattgtcgacacaagataggtcaatctcatttagtagcatgccattgtaaattaggtgatttctcatcactccttgctgctccatgatagtacaaatgcttgtcaaaagctttaatggtcataggtaaaacactaattatgtatcccacaatagttgttacagtaaggtaattctttgtgtctctagggtaggtaaatgtttcagttatatatttgcaatgaaaactgaggacagttacagtggctcatgcctgtaatcccagcactttgggcagctgaggtgggtggatcaccaaggtcaggagttcaagaccaacctgatcaacattgtgaaaccctgtctctactaaatacaaaaaaaaaaaaatagctgggcatggtggcatgtgcctgtaatcccagctacttgggaggctgaggcaggagaatcacttgaacccaggaggcgggggttgcagtgagccaagattgcaccattgcactccagcttaggcaacaagagcaaaattccatcaaaaaaaaaaaagaaagaaagaaaatcgggtaccatcctatcttgatgaacacaaatgtgtagaacctcaggatttactctctgttttcaccttaatttgcctatttatcaaatacctgtagagcaggaatgaggaaccacttctctgggagcaggatccagttctcaagtttgattttatctaatctatagagagttggtattctgccatgaaaagtaagtctttcaaattaatgtccttaaaatgcccttcatctggtccaatcagaacagagtaggagaaaacagtgctagagacacagattctcagttagactttctgatttaaaggcccaactccaccacatgatggagtgtaacctgaatgacttagtctctctgtgtgtgtttctgttttatctgtaaaagtggtataatactaggacctacctcatatagttcttatgaggattaatttggataatatttttaaaaatgtttggaacaatgcttggcaaacgaaagcaacataagactgccccttaaatgaaaaaatgaataaataaacaaagttcctcaagttttaagtacatgtaaaaagcttttgtgagctaatattttatagctattaaaattatacaaatggtacacatttattataaaacattcaagttgaataactgaaataaattactcataatcttacaatctggtattgatagtattttagcgtatttttaaaatttttgtacatcaaattagaatcttacagtttaactgtatattctcatttgtaatggtattgtcttatgtggaattctataagcattattccatagtcttacatattttaataatatattttttaactaattccttgttgctagattatgagctttgttacatatttagataggttccaattttgtcactttttatgatgctgtaataaacattctttatgaaagtctttgcccacttttggggtgatgagagcacctggaaatgaaactgagaaaaagagaggaacatgtaaattatttgatcagtaaatctataaatattatgccaatttacatttgcagtatcattattacctctcatggtgacaatgtaaccgaattttaccaaggtcaattttccttacctaacccacgctttggaaccagctgagccttctctcctccaggtctcttcccatgacctcttttccctccctctacttgtctttagtcttctctcctttgtctctccatctctgtattttcttcttttcagtcctttttatctgattctagttgctgctaaaaaaatatatatgtctcatgaggtatgttcttcccaacactcatagactttattctaacttcagagtaatggctgtctgcccactccttcctttgtaagtaagaatctgtgacttgaagaatcacattttttcactctggcatagtacatttgctagtggtcttaataatagtgggccactagaaaagtaagttttaattgtgtttttaactgtggagaaatgataagagatgtcttcgaaaatagcaaaattattgataggatgtttctgctgcagcctacaaagttagttacttttcactggagactgagtttattacatgagcggcctgtcttaagtttcttgccatctctcaagcacattctctaatataatttattcattgaagcatacaactgtgtttctgccttagggctttattttcatctcctcacaatatacaaaattaaaccccaaagacaatagcattatatgtttcaaataattcttcaatagatatttgtaatttatatttcatgcaatataacaagatgctgtgcattgattgagagcactgtagagaatgtaaactaaactgtaaaatgtgtccagaatatatttcaactaagatggttttatcagtctaaacttaaaatgtgtttcaaaaatcctgcaataccaggattctgcatctattgtgctgattttgctcacttctgactttgtaactttttctgaaggaatcacatttttaaaaatttttaaatatgtaattaacaaaaattgaatatactcaaggagtacaatgtaatgatttgatatttgtatgtacgtttgcaaggattatcaaaatcaagttaatacattcattaccactcatgctgtacattagattcagacttgttaatctaattggaagtatacatgatttgaccaacatctccccactttcctagccccttgaaactatcattctactttctgcatctatgactttgacagttttagattccacttataagtgagattgattgtacagtatttttctttgtttatcaagcttatattcataaaatgtccctccagttcattcacgttgtcacgaatgacagaatttccttctttttatggctaatattacagtgcgtgtgaatgtgtttgtgcttgtgtgcatacatgtcacatttttgttatctatacacctgttgatggacacttatgttgtttccatatcttggctattgggaataatgttgcaaaaagcataaaaatgcagatatcccttcaacatactgatttcagtttttttagatttgtacccagaagtgtgactgctggatcatacagtagttctatttttaattttttgaggaatctccaaactggtttccataataattgtatcagtttaaattcctaccaacagaggagtataagcattcccttttctctacagcctcccaaacgttgttgtttcttgtcttttgataatagccattctaacaggtgtaatgtgattgtcttgatttgcatttctctgataattagcaatattgaacacttgttcatgtatctgctggccatttggtttttcatttgtttgttttgttttgtttttgagatggagcctcactctgtcacccaggctggagtgcagtggtgcggtgtcggctcactgcaaactcaacctctcaggttcaagcgattctctttcctcagcctccagggtagctgggattacaggcacccaccaccacatctggctgatttttttgtatttttagtagagacggggttttaccatgttggccaggctggtctcgaactcctgacctcaagtgatttgcccgcctcagcctcccatggtactaggattataggcttgagccactgcacttggtctctgctggccatttgtaagtcttctttgaaaatgtgtcttcactttttagaaattgttttgtaattgagttccttatatattctagacattaaccctttatcaggtttaaaaatattttcttccattccgtaggttgccttttcattttgttgattgtttcctttgctgtacagaagtttttagtttgatacagtcccacttgtttatttttgcttttatttcctgtgattttggtgtcttatccaaaaaatcattgccaagaccaatggcaagaagcttttcccctaagttgtttcctagttgtgttacaatttcagctcttacatttaagtctttcatacatttggagttaatttttgtatatggtataagacgagggccaatttcactcttttgcatgtggatatccagtttttcaaacccatttattgtggagacatctttttcctcattgtgtattattaatggcattatcaaagagtagttgatcagaaatgcatgggtgggtgtttttctgtgctctgtattttgtttcattggtttatgtgtctattctatgccagtaccatgctcttttgattactacagttttataacatagtttgaaattcggaagtgtggttcctctagctttcttttttttttttttttcaagattgctttggtattttcatttatttggggcttcttcaatatttaatctgtaccttatagtttttagtgtatggacctttcacctcctaggttaaatttattcctgagcattttattgtttagatgctattatcatgggaacattttcttagtttatgtagattttatatgtagatttcgtatctgcaactttactgatttagttttctagttataaaaggtaaagtctttagggttttctgtatatggtattatgtcctccacagagattatttaacttattttccaattaggatgctttctatctgttttttttttaaacccaactgctctaacttggacttccatactaggttgaatagaagtgacaagagtgtgcacctttgtcttgttcttaatcttagagaaaacgaattaagctgttcaccattaagagtaatgttagctgcaggtttgccatgtatagcctttgttatgttgaagtatattcattctacaactattttgttgagaatttttatgataaaagaacttttaattttgttaaatgctttgttgcatctattgagatgatcatatgatttttagccttcattctattaatatagtatatcacactttctgttttgcatatgttgaaccatccttgcatctcaaggataaattccagttgatcacagtgtagaccttttaaatgaactgtttagttcactttttcagtgttttgttgaggagttttacatctgtgtttattagaagtattggccagtgattttcttttcttgtagcatccttatctggctttgatatgaacgttactggccttgaaaaattacattggaagtgttcccatctcaatttttgggggggagattttgagaagaattggtgttaattgtttgttcttaaatacttcataaaattcaccagtgatgccatgtgttttaggctttctttgtttttaatgggaagttttaattactgatttaatctctttacttgttattgatctcaaatagcctatttctttatgattcaatcttggtatattgttcatgtctaggaatttatctgtttctttgaacttatctaatttgttggcatataagagttcatagtgatttcttatgatactttgtatttccgtggtatcggttgtaatgttttctttttcatttataattttatttactttgttagtctttttttctttgttagtctagctaaaggtatataaattttgtttatgttttcaaaaaaactcagtttcattgatcttttctataggcttttctttatttctagtttttatcttattatccaatctttttcccctttatcaaggaaaacttctgataaggtttagctgtgtctgcacccaaatcctatcttaaattgtagtttccataatcctcatgtgttgtgggaggaagccagtgggaggtaattcaattttgggggtggttactcccatgctgctgttctcatgatagtgactgagttctcatgagatctgatggttttacaagaggcttttttctctttgctggtcttctctctcttgctgccctgtgaagaaggatgtgttgtttccccttctgccatgattgtaagtttcttgaggcctcctcagccttgtggaactgtgaggcaattaaacctctttcctttataaatcacccagtctcaggtatgtctttattggcagcatgaaaatggactaatacagtaaattggtactgggagaatggggtgttgctgtatagatacctgaaaatgtggaagcgactttggaactgggtaacagacagagcttggaacagtttagagggctcagaagaagacaggaaaatgtgggaaagctcagaacttcctagaggcttgttgaatggctttgaccaaaatgctgacggttatatggacaataaagtccaggttgagttggtctcagatggagatgaggaactcgctgggaactagaacaaaggtgacacttgttatgctttagcaaagagactggacgcattttgcccctgccctagagatttctggaactttgaacttaaaagagatgagttagggtatctggcagaagaaatttcttttatatgtatatatatataaaaaatatatatatatatatatttatactttaagttctagggtacatgtgcacaacatgccagtttgttacatatgtatacatgtgccatgttggtgtgctgcacccattaactgctgaagaaatttctaagtggcaaagctctcaaggaagcagagcataaaagtttggaaaacttgcagccccacagtgtgatagaaaagaaaaacccgttttccagggagaaattcaggctcactacagaaatttgcataagtaacatggagccaaatgttaatcactaagacaatggggaaaatatatctagaacatgtcagagaccttcatggcagtgcctcccatcacagacccagaggcctagaagggaaatattgtttcctggactggacccagggtccccctgctctgtgcagcctcgggagatggtgccctatgtctcagctgcttcagcaccagctatggctaaaaagggccaaagtacaccttaggccatagcttcagacagtgcaaatcccaatccttggtggcttccaggtaatgttggtgcacagaaggcaagaactgaggtttgagaacctctgcctagatttcagaggatgtgtggaaatgcctggatgtctaggcagaagtttgctgcaggggtggagcagtcatgaagaaccactgccagatcagtgtggaaggaaaatgtagggtcagagcccccacacagagtccccactggggcactgcctagtggagttgtgagaagaggaccactgtcctctagaccagagaatggtggatccactgacagcttgctttgggcacctgcaacagccacagtcactcaatgccagcctatgaaagcagccaacagaagggctataccctgcaaagtcacaggggcggagctcctgaaggttgtgggagcccaactcttgcatcaatgtgacctagatgtgagacatggagtcaaaggagataactttggaattttaaggtttaatgactgccctattggatttcagagttgcatagggcctatagcccctttgttttggccaatttctctcccacttggaatgggtgtatttacccaatgcctgtacctccattgtaactagaaagtaactaacttgtttttgattttacaggcttataggtggaagggacttgccttgtctcagatgagatgttagacttggacttttgggttaatgctggaatgagttaagactttgggagactgttggaaatggatgattgtgtttcgaaatgtgaggacttgagattttggaggggtaaggagagtggaatgatatggtttggctctgtctccacccaaatgtcatcttgaattgtaattcccataatccccatgtgtcatgggagagacccggtgggaagtaattgaatcatggggatggttacctgcacactgctgttcttatggtagtgagtgagttctcatgagatctgatggttttatgaagggcattttcccctttgcttggcacttctctctccttccaccttgtgaagaaggatgtgtttacttccccttccatcataattgtaagtttcctgggtcctctcagccctgcagaactgtgagtcaattaaacctctttcttttattaattacccagtctcaggcagttctttatagcagcataagaactgactaacacaacttcttcccagaatatacccagatataaatgaaatagataataaatcaaagtcagctgtactgagtttgaatgagactgatggtctcttgagcccagagtttagtttctaacagatctggaattgaatctaggcttcttccctagccatttcttggaggtagcccctttggaagtatgactagacctttccaatcattaatctctttgtctctaaagtaagcataatatctacttttttagggctgtgttttagtattaaggaaataacctgtttagctcaatgccaatcacactgtaaatattaagttaatggaaaaaatgctaaaaataaaattgataacaataatatagagaaccttttggcatggttgtctaaataagagaatagataaaaaaagaagtgcaaactatagaccaaatgtttggatctcatattagtttagcatttggaaactggctatagaactagacaattaatattctttgctaataatctataacatttgttaaacagttcgaattacagtagaaccaccaagaattctgaaaacccagtaagttaagttgatgacatgactggctgtctggatgctacggggcatgagctttagccatactcattaactttgataccccaaagtcaccccaaagaaatacaaatacagtgtattaggtatgcaatatccgcttcaagacaaaacttacagtcatttctggtatgatcaaattgattcccctaagtccttgttataggaaaaattatgacacacccacttatcagtaagacacgaatgtaacatttcctgagatttataatagttattgagaaaaggaaaagaaaatttatgaataatagaaataattttcctttatgttttgaaaaattaactcttatttttcagttatcgaacatgtaccttcaattcttcaatttagagtttatttatgataactaactttgatatcctctgagagcatgtctagaagatggcaaatgcttttcaccatgaattagtgctgaatgcagttttaaaaatcttaccttgttaatctgttagaagatagtagcaaataacaataccacattgcttatttgttgaatagcaacaatttcaataattcagtagaagacataagttatatgacagatatatataatcataaatctaatatatttgtaatgaagacaaatattagcttatatgtatgatgtttaatcttactttagactctaaataactgtgtgatattggaaatttactgaaattcgtaatgattatattttatttctttgtaaaatatagtaatttgacttaatgatctctatgattacattattctctaaatctggtaaaggtgaaactttagaaattgtgtgtgtgtctatatatatacatgaatacatgtgaatatattcatagacacatacacatatgtacacatacacaaacatatattcacatccatatatattttttaattgggtagaatatggagtgaggaaacttattgtattcacaaattgagtacttagtaaatatttcatagatttattaaataattttactttatgatatatattagcaagttccctgtgcttccctgtgcacgttttgaagattaaatgtagtaaaggatatagagcactttttttttattatactttaagttctagggtagatgtgcacaacgtgcaggtttgttacatatgtatacatgtgccatgttggtgtgctgcacccatcaactcgtcatttacattaggtatttctcttaatgatatccctctctgctcccccaaccccacaacgggccctgatgtgcatgatgatccccgccctgtgtccaagtgttctcattgttcaattcccacctatgagtgagaacatgtggtgtttggttttctgtccttgtgatagtttgctcagaatgatagttgccagcttcatccatgtctctacaaaggactttaactcatccttttttatggctgcatagtattccatggtgtatatgtgccacgttttcttaatccagtctatcattgatagacatttgggttggttccaagtactttttatatgtctggtactcatggtatgtgctcaaagattcagagaagttatagcacttcaatgtgagtctgatagtcacagatgcatcattatgaggatagtgtgcctgggatgaagggaaaggtagagaggaggcagagaagaaatgccctgagggtccagattggaagaggattcggtggagagaacttttcatttcaagaacaagagaaaaagagtagaaggaactcagcctgaaagtattcccaatcgaggacctcaccaactgactgcccatgccgggaacagttggccatcccacagtctaagagaaactaatgggcacacactgtaaaatgtaataggagtttaatgtaaatgggtatctagactttggaacttgggcgtataccactaaagatgttaacctaaggaaagtatagagttatcagtaataacatgtcagtttgtttcttgtttggttggtttgcttttaaacagtaggatagactgcttgctatacacatgttagaagctttgtagttgctaactggcaggcagtaaagcacggtggttaaaagtcatgccctgggtcaacatactagctgcttttcttactatccatgtgatctgtggcaacttacccaacctgtctatgcttaagtttctttaattgtataaaacatgtgcaatagcacttgtctcctacagctgtttcaaggattagctgagtttacctgaggaaaatatcatagataataagttcccaataaaagctgttactttaaaatcatttaattcaggtctggagaaaaacaaacttggaaaataccaaaattgagaggggaaaggcaggatgaaaatctcacagaaaataaatggttagagttgatggacgaccaggataacacagtgtctctgatccccagatagtatagaatagaaaggaaaaccctgttacataaacagtgtcaaatactgtattagactgttctcacactgctataaagaaatacctgggccaggtgcggtgactcacccctgtaatcccagcactttgggagactgaggcaggcagatcacgtgaggccaggagttcaagaccagcctggctaacatggagaaaccctgcttctactaaaaaaacaaaaaattagccaggttggtggcacatgcctgtaatcccagctactcaggaggctgaggcaggagaattgcttgaacccgggaggcggaagttgcagtgagccgagatcgtgccactgcactccagcttgggcaacatgagcgaaactccatcaaaaaaaaaaaaaatctgaaactgggtaatttatataaaataaaaagaggttttattggccatggttctgtaggctgtacagaaagcatgatgctggcatctgctcagcttccaaagaggcttcaggacacttacaatcatggaagaagacaaagagggagctgacacgtcttatttggcaggaacaagagcaagaggaagggcagggagatgctactcacttttaaacaaccagatctcgtgagaactccctcatcatgatgagaacagcaccaagaggatggtgctaaaccattaatgaaaaaccacccccatgatccaatcacctctcaccaggcttcacctccaacattgcggattacaagtcgacatgagatttggtgggacaaagattaaaaccatatcaaatactaaaatttaaagattaaaaactgaaatcagaaaaaataagccaactagaaatttgttaaaaaaagaatataagatattgattgaaaagtaagttattattctgtgtcacttccatataaaacattttttaattggcatgaatatttagagttaaataaatactagtagtgtggttaagggtttctgtactttatatttttcctcatttgtttatagtgttttttctcaaattttctttcttttctattaactttaaagattctattgattcttgtaccaatagagagttttaataggtttatgaattggcaagttctctactaatggatggtgagaatgattcatctttaaccccaaattcaaataatatcaagagactgttaaaatggtgcatgacgattttagcctttgtttcagtattaaactagtggcacttcattaatttttaacgggattcaatttgcctgttaagtagtttatagaatcatcttacttttggtttcctaagaaggccaaagtattttgcatactcctttctgtttagcatattttttccatgtctctccatgaaataaaaccacatttgacaataacttaagattggtattgtcaagtgtttgcaacctttaggggtcttttgttttaaatacctccatggaaaaagaaagcacacgatgcggaatcggactcatcagaactcaaactgatttctgttactagctctctgtggcctgggcaagtcacctaaactctggaagattttgtttttagcatgtgtaaaataggaaatttgataaatgtaacatttaagtgtattatgacatgtgaccactaaatgaaaacttttgttacaagtattttatgggaataatgactaaggattagcattcttgatatttaaaaagctcacaaattggataagaaaaacgatatcacaaaagctaaaaagagattattcagttaataattttattattagtgtatgtatgtaaaatatttaacatcactacttaacatttaaaaagtaaaaaccacagtgatattcattaaggtaggtaaatttttaaataatgataaatataatacaaaaaatgtggagttttattctataccaatcctgaatcatattatttataattttacctacttttaatcaatgtatattcagattcatattctgctttttaaaaataatttgaaaataatacatattatttatatcagctataaagtattctatatgatcattctatctcaagttacccaactttcccttactgatgaaaatttaaaagtttccagttgtagttgattatgaatagtggtagatggaagcaatgaacatattggtgcacattatttcctcatttaagggaagtgatgacaatggtagttatttctatagtaatgcagattccatgactgggaaattggagtttgtgaatcaaagacattattctatttttacttgaaaagagtgtgttgccacattatctcacaaaatgatacagtgaccacttcctccatctagaaaacttttctccttggctaccacaatgccacacactctcacagttttctttctctctcacttggcattccttttctttttcctctaaatagttattagacattggcacgtcccatcaagtcttggacagcacttctttcactagatcatcccatctaatctcatctttcaataccattcagctactgatgactcctaaatttatgtcttaatttcatcttcctgagacccaaactcatctttaaaaccgatatgggaacttgacacctcaagttaagactaaaacacagctcctaattttcatccccaaatctctttctctaatcgtttttttccgtttcaggaattgctactaactcacttcaagtttctcaactcagaatgtctagaagtcagccttgattccttcttttcacttgccatagtcgccaggagctctcaccctgaaatacaggctgtcaggatgttctgagaatactctcatatatccacttcttgatacatccacctcaggccaactcactcactatttttacttttccctgttattgttggaatatccatacaacttattcttgatgtagcagttatagtggtattttcttcaccaaataaaacaatgtttacattgtaatttgatcagaagatgctaaatagatatttcgagcagtgctcattgaggtatgtagagcatctcatgctttctgaattaaaagaacatgtacagtgtacataatatttggtcagggaccctaagactggtgagttttatgttttttcagagtggtaaattagttaatgcaaagcaggtgttcatttatagcttcaagtaggaaaattcactgtcctataaaaataaattttataagcactgtagctatcacaaagttaatattatgttttgaggaattaataaaaaaattatatagttagcaattgaatatttaatctcttgttcctgtagtatatataagtaaatataaaggaaaatggaaaaaatagacaaaacatacagacttttaaaacctcagacatttgtcagtttccatgtagttgagcggttttgagtgagtttcttagtcctgagttctagtttgattgcactgtggtctgagagacagtttgttataatttctgttcttttacatttgctgaggagtgctttacttccaactatgtggtcaattttggagtaggtgtggtgtggtgctgaaaagaatgtatattctgttgatttggggtggagagttctgtagatgtctattaggtctgcttggtgcagagctgagttcaattcctgggtatccttgttaactttgtgtctcgctgatctgtctaatgttgacagtggggtgttaaagtctcccattattattgtgtgggagtctcagtctctgtaggtcactaaggacttcctttatgaatctgggtgctcctgtattgggtgcatatatatttagaatagttagctcttcttgttgaattgatccctttaccattatgtaatggccttctttgtctcttttgatctttgttggtttaaagtctgttttatcagagactaggattgcaacccctgccttttcttgttttccatttgcttggtagatcttcctccatccctttattttgagcctatgtgtgtgtctgcacgtgagatgggtttcctgaatacagcacactgatgggtcttgactctttatccaatttgccagtctgtgtcttttaattggagcatttaccccatttacatttaaagttaatattgttatgtgtgaatttggtcctgtcattatgatgttagctggttattttgctcgttagttgatgcagtttcttcctagccttgatggtctttacattttggcatgtttttgcagtggctggtaccagttgttcctttctatgcttagtgcttccttcaggagctcttttagggcaggcctggtggtgacaaaatctctcagcatttgcttgtctgtaaagtattttatttctccttcacttatgaagcttagtttggctggatatgaaattctgggttgaaaattcttttctttaagaatgttgaatgttggagcttctgcacagcaaaagaaactaccatcagagtgaacaggcaacctacgaaatgggagaaaatgttcgcaacctactcatctgacaaagggctaatatccagaatctacaatgaactccaacaaatttacaagaaaaaaacaaacaaccccatcaaaaagtgggcgaaggatgtgaacagacacttctcaaaagaagacatttaggcagccaaaaaacacatgaaaaaatgctcatcatcactggccatcagagaaatgcaaatcaaaaccacaatgagataccatctcacaccagttagaatggcaatcattaaaaagtcaggaaaaaacaggtgctggagaggatgtggagaaataggaacacttttacactgttggtgggactgtaaactagttcaaccattgtggaagtcagtgtggcgattcctcagggatctagaactagaaataccatttgacccagccatcccattactgggtatatacccaaaggattataaatcatgctgctataaagacacatgcacacgtatgtttattgcggcactattcacagtagcaaagacttggaaccaacccaaatgtccagcaacgatagactggattaagaaaatgtggcacatatacactatggaatactatgcagccataaaaatgatgagttcatgtcctttgtagggacatggatgaaactggaaaccatcattctcagcaaactatcgcaaggacaaaaaacccaacaccacatgttctcactcatatgtgggaattgaacaatgagatcacatggacacaggaaggggaacatcacactctggggcctgttgtggcgtgggggcaggggggagtgatagcattaggagatatacctaatgctaaatgacgagttaatgggtgcagcacaccaacatggcacatgtatacatatgtaacaaacctgcacattgttcacatgtaccttcaaacttaaagtgtaataataatacaaaaatttaaaaaaaaaaaactcagacatttgtcccaccttcccctgtttttaataatgctcgttgttttgttcctacagtgtctgagtattaagtattttctaatgagaccttttgtgaattagatggttaacgaaagagtgaaaacattacttatcaaaatactaataaatatttaaatataaatatacttattcttaagcatatttatatataaatattcttaagtatacacttaaatatatatacttaagtatatatatttaagtgtatacttaagaatatttataaatatactcattcttcagcatatttaaatataaatatactcattcttcagcatatttaaatataaatatactcgttcttcagcatatttaaatgtaaatatactcattcttcagcatatttacatggaaatatactcattcttcagcatatttacatggaaatatactcattcttcagcatatttacatggaaatatactcattcttcagcatatttacatggaaatatactcattcttcagcatatttacatggaaatatactcattcttcagcatatttacatggaaatatactcattcttcagcatatttacatggaaatatactcattcttcagcatatttacatggaaatatactcattcttcagcatatttacatggaaatatactcattcttcagcatatttacatggaaatatactcattcttcagtatatttaaatatgagtatactcattcttcagtatatttaaatgtaaatatactcattcttcagtataattacatgtaaatatactcattcttcagtataattacatgtaaatatactcattcttcagtatatttccatgtaaatatactcattcttcagtatatttccatgtaaatatactcattcttcagtatatttccatgtaaatatactcattcttcagtatatttccatggaaatatactcattcttcagtatatttacatggaaatatactcattcttcagtatatttacatggaaatatactcattcttcagtatatttacatggaaatatactcattcttcagtatatttacatggaaatataccattcttcagtatatttacatggaaatatactcattcttcagtatatttacatggaaatatactcattcttcagtatatttaaatatgagtatactcattcttcagtatatttaaatatgagtatactcattcttcagtatatttaaatagttgagtcagtattatatcttctaattaggtttctaataataatttcaaaaactatgacatgttttcttcccatttttttatggctgaatcaaaatgttgagatttataacttggaccccgtattctataatgtcacacagacatatatttttttaaattttaccttaagttctgggatacatgtgcagaacatgcaggtttattacataggtacatgtgccatggtggtttgctgcaccaattaatatgtcatctgggttttaagccccacatgcattaggtatttctcctaatgctctccctcccccagccctccaacccctgacaggccctggtgtgtgatgttccccttcctgtgtccatctgttctcatttttcagctcccacttatgagtgagaacatgtggtgtttggttttctgttcctgtgttagtttgctgagagtgatggtttctggctttatccatgtccctgcaaaggacatgaactcattcttttttatggctgcatagtattccaaaaatgtatatgtgacacattttctttattcagtctatcattgatgggcatttgggttggatccaagtctttgctatcataaatagtgttgtaacaaacatatgtgtgcatgtgtctttacagtagaatgatttataatcctttgggtttatacctagtaatgggattgttgggtcaaatggtatttctggttctgcatccttgaggaatcgccacactgtgttccacaatggttgaactaattttcactcctaccaacagtgtgaaaacattcctatttctccacatccccttcagtatctgttgtttcctgactttttaatgattgccattctaactggtgtgagatgagatctcactgtggttttgattttcatttctctaatgaccagcgatcatgagctttttttcatatgacaaaaatatcttataactaggtttgattctagtccagtatgctttttgttataatatgttacttaaagctcagacaggaaatgcaattctattttggggaattaaaattagtgatgtggtggtcataaagatgtgggaaaacttttaggatagtagaagctattgtccttattaaggtgtacaaagaattttggacctgttttttttttttttatttgattttcaattattttctctacattgtcattttagcccattgctatgtcaaccagtttcagcttgccctatgggggaaaaaagcctattaaagaaattctttacatgaagaattgatatctctgtgtttatgaatgtaacactttcagaagattgcactgaaagcaactatatttacaaggcttatctgtcctgtgtgtgtgtgtgtacttatcctaatgttgttaatgttgtttctcattcagagccttgtgaagtgggactgctacacacattttaagttaatatcaaaacacacccacaatgcttttggtgaaattgtttcatgttgccaagtatacatatgccaaaaatctcccctctttatcaaaacagatacgatagttacagtagttagtcattgaagtagctggatatgtgtgccattcaccttcataggaatcagagggattgtaagaatgaacttgagaactgcattcttgccatccaggaactagggttaggattggaataagtaatgtgtgtagcaagtgccagccaaagagaagggaatcactcactatgcatgagtcctggggaagatcagagcactcataaaaggcatttgagttagatcttaaagaatttgtttactatatttaaccatattgatcttgagaacaattcctttgtatttcttcctcaaaaatgaactaaagcagataaagtctttataacctatgttttcaagtatatgaaattactatatcatagtctgagaccaagtgtacaaatatgaaaagtggagatacaaagcaattttccacttactgcaagtcagagcaatatctgtctcaattgtcatgagattttacttgaacatgacctcatctttttgtcctttcatgtgtggtcgacctagcttcaaaatcattgtatagacagtacattttccttatattgttgcacagatcactggcaattttgcatcattgaatgcaacattgtatatcaaaaattggcatatataaattatatcactgcacacagggcagacaaatttgtacacattgttttgcatctatttgtatataccattgacattattgcctgtttaataatagattttgttaatgcacagataataagtacatttcttttttgctattctgcatttttttccagtgatgtcttttagagctgagcctctgccccagaaaataatgaagcttcagtaagagtccctgaggcagatggcatggagatgttatttgcatccctaattatttggttaataaacaataaactatatttagttactagttagaagattttcattttgtaaatgtacctctgacccttttctttcttaagtgaatgaaacagtaataaataactaaagctgttttttgcacaaaatgctagatagagactaggatttgagaatctatttttaaattcacttattgttacccacttagctaaaagccactatgtgagttaaaggaatatcctgctgtaaacagttccatttaaattcttaacatttctactttgaattgtggatcctctcagccagcttcccgggtccctttgaagcaggcctgtgccaagattccccacctctcatggggaactaagcaagtccattcttattcccagctcatcagaataccctgtccactcactctgctgacccacataagctgattgctccctgatgtgtggagaagtgattgtgataatgttcacaggaggggatgtgctaatgcatgagtgataactggagcccggtaaaacttactgagacagaattctaagcagaattccacactcctttcctagtgtggtccactctgagtgctagagttttaatacaatccaaggatttctccaagataattgttaatgacttaattttatgaggattttatttatgtaaacaatcaaataatttttaagaatgaatgaatatatgtatatatatatatatatatatagagagagagagagagagagagacttgagtaagaatatctgcataaaataaattaagccaagaataaaatctagaataaatacagtaactgctctggagaagtctaattctgctctactggagatacaatgagaaccactaacatgattaaggagatttttttcaattacaattcaatttgccttacataatctctgtcgttcttatatgtatgcagctggacccaagaattttccctcctgtttcagggatgttatttccaggatataattaattaatatattcattttttactttattcttatattcattttgtagatattgagtgcctattatgtccagagaaccatgctaggcagtggttattaaataatgaatacaaataatttcttgacttaaaaacaatgggcaatcctaagagtttacttagtacttgttcagggtttgctacaaattccatgatttaactgattttcttattgatatccattctttgatcttccctctaatagaggggcaatttggtaacctatatcactattgtatgtttgagctttgaagcattttgtagtctatatacttactttctgcatcttcaccgagtaatattccttgtgatctgcgtggacaagaatgtttttacttttttttttttttatatcagagagaataacatcttgagaatgatgacattttctggacaattccagtgaatgggcacttagctagggaagccaagaaattatgcctaattaactatgctatttccaaaattctgcagacttttactaagaatgcatgccagggatgaaaaaatacaaagtaaagcagtagatttgcacccagaaaactgacataacttttcctttctttgcaacattgatatttgccttcaactgatgaaggcttcgatcttgatttcaattagaaatgcagtgaacaaagagattctagggaatacatacaacatgaagctcctcagtcttccttacaggggagaactacacagcagcttccaaatagttgcaaagacgaacatgacttcagtgactttgactagattatattatttttattgcctttatttttcacacataagacttcatttctgtgaataaaatatatgacatatctggttttccatatggtaaaatctttaaagattttttgtacattctctaaatgaataaattggattctcaagtataaaaacatcataaaaattgcttataaaatattctaaaagaaaccctgagtagctggcatatagacgtgctctacaaatatttgctgaatgaatgaaccaggagaggtatttatagtaaataaggaaatgaccagactcattaacaataaaaattatatacagtcaagtgttacttagctgaaataacatggtgtaaataaatggtgtaaataatatgccccctatattaataaaacagatgaagcaaaactgaaaataagccaataagaaataaaatccacttgatagttttgctaatgattgtaacataatagcttgcattttaacttacattttaaataaagaacgcagtccaatctctcaaattatggaagtttttcttctaaaataattctgataactagctttcatttgaatatctccagtagtgaagagctcattacttttatgggaatccattctattgttggtaatagttatcctaatgctttaaaaatattacattgacatctgactacctgcatgttccttttagaaaaagtttaatttagaaaaagaaaaatactactacctgagataacacacaaaggtgtattttctcttggccacagtattttcaggacattaaaaaaataagattatacatcatttatactgtttagtaagtgagctttcaaattacaggtcatgtaagtgttcaagatgttctaatcagacctaattgtcactattttacattaaacttgtatacatgtctaatgtaaaacaatgtgtttaaaataatgtaaaataagggtatgtttgtttttacactctggctcaggctagcctctgtgtatatcactgtggcttctgtgtggagcaagaacttaatcaaatttggatttgcattcacattagtttcaccactatctaggctttacgtagttgtaagcaactgtttagcttttgggtctggctttcatttttcttgtctcttataatcttagggtaatatttgacattttaaaaacaaattaacatccttaaatcaaagatcttaaaatataattgttgtgaaattccctgaaaataatttacatattttttaaatacatgaaactaaatgacttgctgtaagtctgtttctcacaactgacactctgcttttcctgtgaagaaatacataaacagaagcctcagctagacagattttcttttgtttgcctaattgccagaaggttaatgattttcataatgccatttatgtctggatattatcagcactgtaaaaaaaaaagttctaataacttttgttagtgtagtctgcagaaccattgaaggaacaaacatattgtataaggaaactttttgttttctcagcaaagtgtttcaaatatgttaaaatcagctcaatattcagtattattatttggttaaattccagaatggaaagaacttgtagtaaaatgattaggctatgaacagacaaatgcaactgacaatgttaagtcgaaaagtattttttttttacttaattgaagcaaaatattaattttaaaaatatgagttagagctgaataatctgtagacataaaagcacgtatacttttagaatgtgtgatgttattgttgcatcactggaaaaccttacgtgtttattcttttgaagagtggaagatggaatttaatttactctttaactttctgttataaagcttaaccgtctttagtctcttcagagcaatgttacgagattgagtttccacatcattctggttattcttcttgaacacccttagttttaaaattatctttcttaaaagattgatctcataagattgaataccttgtcctatgttttatagcttataatttttcttttgtggactacctgttaaagtcttttacccattttttattaggtttactgattgtttcttattgatttgtggggcttgtttatacattaacaaaaatgaatatttttgttataggtttagaaatatcttctcccaatctatagttagccgtttaactctctgattcctgccttttgataatcgatgtctaattttactataatcgaatttatattttcctgtttagctagtacattttgagtcctgtttaaaaaatctttcccaaccacaaaaagatgctgtatgttctcttccagaaacttttacaatttgatctacacgttttgaccttgatttttgagtatggtgtggggcagaatcacttctagaacaatttattgtgggggaaaaggacggtgatttttgaaaaaggaaacaagaagagcttgtggattgctggcaatgatttctttatagatctgggtggctgttacactgttatgttcattgtgtgataattcctgatactagctatttatatgtttgtaatttgttcatttatatatatatatgtaaagactttataaaaatgcatgaaaaacatatctaataatacattgtaaatataatattctacttagatgtcataattttaaccctgtatattatttcataaagtaaggttacataattctttctaagcattagatacctttaatcatgaaattgataatgcgtttcttcaaaatgagtagctttgtttattgttgatgttaaaacaaactgtactggtataggttcaggtttccagccagtgaaaaacatttacatcattattcagtttgttatcctattaggtttcttttccaggtttatataattggcaaatttcataagcatgtctttcatgccttagagaataaaaatattaaaaatgacagtatacaggatgaaagcctgtggaacatcattagagagcgctcttcaagctgacatcaccattaatcaacgtatttggggcacgataactagccattttttaatctacctaaaactgttatctcccagcccacattttactagtttacatttgccagatattttgtcaaatgctttgcaataattaaaattgaagatacatctatggaatttatgctgttctattaaacaaggactcaattttataaaaggaaatccttataacctaccactattgcctcctctatcaccagaccccattcatctttttcctaaatatttacaactcacatgctagactttaaagaggatctctcttgttatttttcccagatgtaccaacttcactgtttttaaaatttatggtttttatggtttttagtttttgactatctttctttttttggcagctcctttaataaatattcaagaaagctaagattacatttatggataatgccagtccttggggttataatctgaattcgaatgcttcaaaaagttaaaggaacaggccaggcgtggtggctcagcctgtaatctctgcactttgggaagccgaggtgggcggatcatgaggtcgagagatcgagaccagcttagtcaacatggtgaaaccgtgtctctactaaaaatacaaaaattaactgggcatggtggcatgtgcctgtaatcccagctacttgggaggctgaggcaggagaatcgcttgaacccaggaggcggaggttgcagtgagccaggatctcgccactgcactccagcctggcgacagagcaagacgccaaaaaaaaaaaaaaaaaaaaaaaaaaaaagttaaagccactttgtctgtcttattatgtcttagcttgtctgaggaggtatttgtctatactcagttagtagttttgctacttctagaattatttgaaactgttgtctttgttggtagaaatgggtgacaaacagtactattttcctgtcattaaataatatctgatagtattatatcttctttcttctgttttgcttaaaaaatagctttcaagctcttttgtttgaaccttatttatataagtattaatttatcgatattttaggaatgattgggccactgccaattttcctactctagtttataacagatgttgattaatggatatagccctcttccctggctactctaatcaacaaatatctgcacttggttgaagcctgtttatccacttctcatagatcacatgacctccttgcagatgtttatcccccactgcaaataaaatctgagctcattaacgagttcattttagcacttattaagatgcctgttactgtttttgtatcaattagataattctccattataggcttaaactcatgttacatattattttcaatgttcagaaggtcttaaaattcatggtgtcatgtcttttttagttttgaataaaaattagtttttcaaatgtttatattctgtgcattggtcttagtctagaacttctcttagacttaccctagaaacttccaatttatccccaatatcttttaactactgcaaattttaacaggtttactgatgtataattgatatacattaacatatatatttatataaagtataatttatatatagtggtaaattttatatatgtacatattaatatatatcaatatacattatactatgtttagatatttaatctaatatattaatattaacttcaatatatttattatatattatattttatatattataaatttatatgaatatatacactgtataatttataaatatgtacgtgtgtgtgtatatatatatatgtcaacatggaaatattaccttttagctcactaattatttcttttcaggctggagtacagtggtgcaatctcagctcactgcaacctctgcctcctgggttcaagcgattctcctgcctcagcctccctactagctgggattacgggcacccgccaccacgcctggcaaatttttgtatatttttttagtagagatggggttgcaccatgttaggctgatctcgaactcttgacctcaagtgatccacccgcctcggcctcccaaactgctgggattacaggtgtgagctaccatgcccagcttagctcactaattatttcttagattatatataattggtagcctttcctcagatgagtttattttcctatcaaccaacttttgcatttctaaaactacttcatagtttcttttagtatccatctataaatgttttatttttccctgttgtaactgataattactgctatttttaatgaatagcattacctattttatatttttgagaggataaagcctatttatctccactagccctcaattgctattacttatggaactaattggtgttgaacttttgactttgttgacttcgtggcattggatttcattcctgtcatttgaaattttcatttgcatgttcttcttgacagccagtctctctctttctggtctctctttctctttcttctctcttcctatctcctctcatctcccctgttttttgtgctttatcattttgggactttctctactcaagtcccagaatgtccagtctgaaagtgtaccttacattactcgcccgatgcctgtgcctggcagtgtttttagggaatcatgtgtctagtcaccaagccagtgaatgcctttactcagctcagatatgcctatttgctaacctctttgggcatacagcctcatataatccatatgtttaagtgagtaatcagctttcttcagtctcttttcacaaccaggttagccgagggccagtctcggtttgcaaccttaaagcaagctttctgtagctgatacacacagggaacttacattaccaatattccgtagtagtcaaatgcccaaatgcctttgtatgtccccagatccggactctgtctggcctcggcttcagccccactcattgctttgcatgtttgttgcatttcttgtgcatagagatgtttatcttattttttgatcctggctatgtcttttcaattttcttcttatctatcttatctaaaaatacagtgtatttgaagcagaagggggtctcaaagcctgaactcataatgcaattttgcctggagtctccttttcaatttatttttttcagctgatacttatttctcagccagttattaaaggtagttctaaccctaattgaatttttttttcaccttgtatttttgctaaattagaatccaggcatatagtctctggtggtgttaaaaccaccaacttgagtgccgcgtttcttcaggagccatttatcactacaacagaaactccatggcctctctaaaccacccactaaattcctcttttgtctgacttactgaattacaaattacaaagcaaaaataactcatattagtccagagtactagtttcttcaattattcagattctctattgtaatggatcactctaggagcccacatagaatggacacgtagaatacaaacactgtatatctttacagcatacgtgtgctcacaccatatactacacacacgcaaatacacagggggaggaatatctgtgtatgtgtgagaataaagagaagagtgaggaaggaaagacagatggaggatgggaggggtgggaaagggaagagagagcacagaagaagagagagaaggggaatgaagaaacagcattcttattgtttcgagactagcaagagttccataacaagtatacatctttcaagttacttcaacaatacactagttatttgctagatgttttaggcactattatctctaggcaagtgttcttcttaggaactaagagtttatgactgttcagcatctccacttcttctaactcctctttgacgtccaaccactttctttgagctgctacaatacattgggaacttttttgccctcttatataccacattccagaggtggttgtgatgaaagaggtatcattattaatcctcggatcaatagaggttacacatttcacaagccaagtaaacaaagtaataaacttccccgaattgcattgcttgatagaccaaagagaaaaagggaacttttcatcgatctttccaccatgttcctcatgaaagactgacttttgccctccccttgaggttaatcactacagtattctctccacatatatttctgctaagaaatacattttgacttatatttcttctgattttagatttttgctttccttaaagttaacaataaattctattttgctaaaagtaatgagataaatgggattaagcagctgtatgttagttgcttgcttgctgaaagactggaatgcagcaaacaataagtaactgaagaaaatttattctggagcattcattagcaaaacagaggaaatagtctaagtttcaccaatcaatcagacattttctcacctgttacctcattgtattaattgctcgttgacttgagttcactcaatcactctgttgcttttggtaatacatagaactctgtatgaaattggctataaaatttcttcaaggtttcgaactgtatatctaacaggtaagaaaatatatttgttaccccacaataactgagtatattgttgtccccaaaattaacctacagctctttcaaaattttatggaattctaggtaaaataggaagatgaatgatatatgacaataaggaatattatatattaacactacaataggaaaaaaataacatataaaaaacacactacaaagcaggtataagtaactcattgttagtaaacagattatcaggaagtggtcccaagaggtactgcagactagaatctccaggatacacatcctgagatgaaaaatagcatctaggaagttaattaggagtgttttggggatgaaaacctgtggaagagaaaggaatgaaacagaaattagttacagggaggagtttaggtgaaatgcagtttcaatgaagtctttgaccaatccctgcagggagctctgagactgtgaagacacctcagagtttctacaggttggggcagggtactggctttttatagccccaggttgaccagtcgttgcagttgcacaaccccatgaaggtataccatctacatgtgcctctttttaacccaggaaattcctgaagaggaattacagctaagtactgtatcatagaaaaaatattcttgtaaaagtgtgaattatatgataatagaaactgagaagtagttacatcgtttgcacatatattccatagatagcacccatataacctatgcaaacacatacactagatacttaaatttttccaaatgttttgtgagatatgatttcgatatagtgaaaggtacagattttaaatttgtatttttttttaagagattaatcttgggcagggatcaacaaacttcaaccctctgtccagctacaagcttttgttaataacacttcattataacatggccatactcttttgtgtatgtactgctcttcatactataatagaatttggcagttttaacagaggtagtatggtctacaaagccaaaaatacatagtatttaaccttttacagaaaatgtttgctgacccttgatctagggtttgctattttcaagtaataccacctcatatgtaaagttaagaccacagcataacatatttcctgtccagactcctatcctttgtactattgtagttgcatatctgacttccacatttattataaaccctgttattcatcattactgtttgtaagcactaaattatcttttaatgaaatttaaaaacatgaacaaatattttatatgtacttaacatgtttagcattttaagcactcatttcgtcatgtaaatatgagtttcaaaatggtaaacttcccttaaggtgaaaaacttatatttttatagtatacacataaaagtgatgaattctcccagcttttgtcttgaatattacgttatttttatatttaaaatatatttttgctggacatagaatttcaggttgccagctttttttttatctttccttttcatcatgtctgttaggttgtttcattgtcatttggcttgcattatttctgctgagaagttgtaaccctctgaatacctttaagattttctctttagcatcgtctttcagcaaataattataatgtgccttattgtattttcccttgtatatctcctgcctggaattcaataaacttctcacatatctgagtttatatatttcaaccattatttcttcaaacatattttattctgacccaatctctgtcatctctgcttgtagtactccacttgcatgattgttagggcagttatcaatgtctcacaacttactggaataactgtttattttttaagccttgtttttcctctctgagcttaatttagatgccttatatggccctacattctagtacaatgatgttttcttctgtgtctcatctgctgttaagcccatccattaaattttctatttcagatgtaattcttactcctaaaatttccattttgttctcgtttgttgcttttctccttcaacattttgcatttttaaaaaatgtttatatgttttattttagataatagaattaataattactgtttttaaagtcctggtctgctaatttcatcatttctgttattttggggatacatttccattgatttttttctctctggttctaagacatattttcctgcttgtccaaatgtctagtatatttttcagttgatatacttgacattatggatgcaatgttgttcagtttctaaatgtttatgactttccttaatggagtgtcaagttttgttccatcaaaaaattaatttttggtcagatttatctttttcagtaacctttgctcaggtgtgtccagactagccctcatattaggactaaaatatccctacatataatgcatgacttttatgggatgtctactgaatgcctggagggattcaacaaggtctctcaattttgtctagtctgaaatcaaatttttcccagctctgtgcaacctctggttattgttgacttcagaactccctttacctggtcttgtgcagtcttgatctaaaagtgcacagcatggtgtttcttctgagtccagattgcagagacacattcatgactcccttgtagatttctaaagcactttacacagctgtgccctctctgggactctgtcctgttaattccagcttctttagtagctttgaattgtaatatgtttccgtttcaatgacactactgcactgctgaactctgtttgggatcatcttccatatgccatgatccagaaagtgaagctagcagaaagccaggaagttggcagggctcaccttatttgtttatcttattttatggatcacgtactgcactgcccattgtccagtccctaaaacagtgattttttaaaattttattttattttattttttgagatggagtcccactctgtcactcaaactggagtgcaatggcaccatcttggctcactgcaacctctgcctcccaggttcaagcaattctcctgcctcagccttcccagtagctgggattacaggcacctgccaccacgcctggctaatttttgtatttttagaggaaatggggtttcagcatgttggccaggctgatctccaactactgacctcaggtgatccacctgccttggtctcccaaagtgctgggattacaggcgtgagccactgagcccagtcagttattttatatattttttagttttgtaattttaaaaaaagctattctatcatagttttaagcaaaaataggccatgtaaccattattatttgaatatctgtgatgatttatgaaatgattattatgaacgtcctcatagaataaattattttgccagcctttaaattccttatttaaaaaatagtacacacgttttgatatactgtacattggataatctattgaatatttttatatcattctctttagtagctgaactcactgtaaaaattatagtgcctcttagcactaacattatgccatattttctgtaacttattttgtgtacaaccctagttattttaaatattactgtaaattaagaatattgatctatatgagtgccatttttctaacaaatgtttttacattcttactatttgctgagcaattcttatattttgccaaaagagatttaactttgtttagtatctaatttttctagaaatatgacttacaagaggtattgactgtatatcttctaagtgttaaataaacattcttcctgatttcctatatacttccctgtacctctcagtggtacaggaaattaatgtaagattaggttcattttaagaattgcaaatatttttctactttacttcacaagaaaaatatattttagaattgtgtataattgcttgtttttaatttataatttattaaatgataaagtttacatgacagaaaaaattggatagttacatacatttttctcatgattttagctgaagagtttatggtaaattggtcaaccctcagccaattagactttgacatgtactaataagatctaattgaggaattatgaagacatttgctcaggagaaaatgagcacataattacaccataaagaggttaaagaatcaatgttaccagctggaagaatattagttgaagtcccaatggcatctataaaggatatttcataatatatctgtgaaatagagcactgccaagaccaattaagatatgtagaatattccattgtcagttgtacaagttcaaatttaaatattcattttcccatcttacctctgcccatcttcaggtgctgggggatggtctccatcagacagcgaccattatcaatggcttcaggttgactttggcaatcggaagcagatcagtgccattgcaacccaaggaaggtatagcagctcagattgggtgacccaataccggatgctctacagcgacacagggagaaactggaaaccctatcatcaagatgggaatatctgggtaagtcattggcaggaaagcaaagacacagaattggattggaaatattagaaaatggtacaggatttactaagcatatatagttatcaatatttatgtattcaaatcattgggaaactatttattcatcattgttgatggaagaaagtttcttcaggctgtaatttctatccaatggttaaagcaatgattctagatctggactatgaatttgaatcacctgaggaagttttaaagcacgtagatgaaaggcaaacccggatcaataagaccagaatcacgtaagttgaaatagtgattaatgatactgataacttttctgaagacagcgatcttcaattgaaggaaaatattgaaattatgaagaatataatttagagaagtaagagcagtgatagatgttaagaaaagaacttgtccattttataatagtgtcttaaacacttattacagatctatgttcactttattcctttattatgaaagaagagaataaagcttaacccatttgttcttaaaatgtctctattaacttaaaaagttgtatatattcaatcaaatattcaccacataataatttgaataaattatttaacagtaaaatttaagtgttctactttgtttaattattttaaaaagcaggcatgaccaaaatcaagtgctgtcatcaatattaaaccagaagaagaagaagaaaaagaagatgaggaggaggaaagggagaggatgaaagggaagggggaaaagaaggaagaggaaagggttcacttttaaaatcatgtccttcacagtattagttggagtgctggatatttttaactttatcatgaatcactcttgtagactttgtattttaaaagtccccaattattttttctaagtaacaagagtttataatttctagctaaagtggatgttcatttctacagcagtatgtgaaataaggatataatgtcctgataataaaaaatgtgtctacttaagtagaactttagaaataactcctttcaagtcataattatatggaaagaatatttgtgtattaggatgtataagttacggaaagcaagtagtgggaaaaatgcctctttctaaaatgtcttcatctcgcaattgagataattcaaatcctcaggcataatttatagaaaagtgcttatcaagcctgaatacacagtagaattagctagagaactttaaaacatatagacccttgtgtcccaaccccagagacttgaatttagttggtctaaggtgcagcctgggctttgggattttaaagctccgatggtgatgctaatgtacagtgaacaccgaatacatagtttagattggttttcagtctacagttaagaaggggatagaggaagtatatgctgaaaatgaagaggagaacagaaaatttgaaagagttgcccttaaaatttggcagagagagagaggggaagacggaggagtaagggggttgggtggggggaaggggagggagaaatcaagtggccaaccaaccaaacagcagaccaaacaactgagagtaaacagtgaaggcttggatcacagacccttctaacacccagagcactcattattttctaactttctatggtttctaaactaagatcaaatgagcatgttggtaaaattgcttgaggggtttactttctgtgatttctaaactaagatcaaattagcatgttggtaaaattacttgaggggttacaagtcagactctgaaatactgttctctatatcagaacagaaatactgttcacatttttgtatttgtaaagtcttcatctcaaaattaagagtgttcaaatctcctctcctctcataatgtgccaagatagtaataaagatagctgctaaaatacttgaactttaatgtatctgtcaaatactgaacagttaaggacggctaaatgcagagacataaggaaaaaaggctaaggaggataaaattgttcagcttgtcttggagtcttttttttttttgagacggaattttgctcttgttgcccaggctggaatgcagtggtgtgatcttggctcactgcaacctccgcctcctggattcaagccattctcctgcctcagcctcccgagtagctgggattgcaggcatccaccaccatgcctggctaatttttttttgtatttttagtagagacagggtttcaccaggttggtcagtctgctcttgaattcctgacctcaggtgatctacttgccttggcctctcaaagtgctgggattccaggcgtgagccactgcacctggccttggactcttgatattacatagaataataatggttgagtcggggagacaaggatgtcatgtagtgaaaacatcacaaattatgaagatatgctgggtctacttatagggctctccatcttaaggtgataaaggtgcatttctattgtcttctccctttctggtgttcactttgtttcttcctttcaaatattgtgtttcttattaaaaatcagtatgctacgtgatgagtgattattagtagtgagctcattataaaattttaaaaatcaaaacaagttggagactatgttagtctgttcttgcactgctgttaagaaatacctgagactgggtaatttacgaagaaaagagttttgattgactcacgtttccacaggctgtataggaagcatggctttggaggcctcaagaaacttactatcatggcagaaggcaaaggggaggcaggcatgtcttacatgccgggagcaggaggaagaaagagacgggggtgtcacatacttttttattttttctgagacggagtctcgctctttcgcccaggctggagtgcagtgacgcgatctcggctcactgcaagctccgcctcccggtttcacgccattctcctgcctcagcctcccaagtagctgggaccacaggcgcccgccaccacgcccggctaattttttgtatttttagtagagacggggtttcaccgagttagccaggatggtctccatctcctgaccttgtgatctgcctgcctcggcctcccaaagtgctgggattacaggcacgagccaccacgcccggcctgtcccacactttttttttttttttttttttttttttttgagacggagtctcgctctgtcgcccaggccggactgcggactgcagtggcgcaatctcggctcactgcaagctccgcttcccaggttcacgccattctcctgcctcagcctccccagtagctgggactacaggcgcccgccaccgcgcccagctaattttttgtatttttagtagagacggggtttcaccttgttagccaggatggtctcgatctcctgacctcatgatccacccgcctcggcctcccaaagtgctgggattacaggcgtgagccaccgcgcccggccctgtcccacacttttaaacaaccagatctcctgggatttcactcactgtcaggagatcaacaagcgggaagtccacccccgtgatccaatcacctactatcaggcccctcttccaacactggggattacaatttgacatgagattttggtggggacacagacccaaaccatatcagagacacaatctaaatattgcaaaatatatttaagtaccagtaagcctgccacataatgattacattatttaataatctgtgacagaaatgttttaatccttactaatacaaaaaaaaaaaaaaaagagtccaatcctttgacgtattctaaaagagttaaagttcgttgacttctaaaaattcttgaatattttagggctacgtcttatcattcattaagtgattaaaatttagcatttacaaatttcaaaaaaaagtactcttggggattaagtttattaaaaatgatattaaatactagagttttttaatccactactgcttaacattatgtatactggacttgaagagaattctgatatagagaagattggatggctttttgatggaaaacaccttacaagatgtaaaaatttatgtatttttgaaattgtttttactatccattttataatgattgtttacctgagaaatatagaagataatgtatattgaatcacatgaatataattttaaacaaatgtccatggttatgtttttctgattgttggggaaatggacaacataagtaattttttatagtattcttattaaatgttcatatggacattccgagttattttatcactgttggataatatattaaaataagcaaagaacaagtcatatataagcaaattatgacagtttcacaaggttttagagtcatgaatcttgcattagggagtgagaatggctcctgaaaagattcctaaagaatggtttatctgaatatttaatattcaaagatctgagtttctaaatgggcttaactagtcaaaccttccattcctctttgatgatactgagcataatagaattctttatattttacaatataatttccttctatttagaacctcttttccaatgtaataggtaaataaaattgcccaaaaaatcattacatctacatactccaccaactctaatttgcatgattatcttgagatgttttcaagtttcctaagtataatctgttagagagagagagaggaagtattctgtataagcattttgtatcagaagtccattaaacattatattaaataagaattccagcaggcttttgctaagaggcctgttttgcttgggaaattcaattactggattttgaatgcagatattcggagccaaaataggaaactggagtaaaagcagtggatgccttctttacacaccactattattttgtaggataggaacatactacaaatttaccagtcatatgagcgcagtttttgtttttctttaaaaaacacttcctaatcatgaaaacatgcttgtatattctcagttatttttaaaaacagttttgatccattttgttaattttaagtaggtgttagactgaaatttgttaccactgcatctattaaatggagaattctacagaacacagctgttttatcatatttaaattatatggttagatacttatcaagaatatagggataaacaaattcatattatctaagaagtattaaatagattacttattttcaaaacctagatctccttgtcacatatacgcttttcccatgtacaaatgcatacacataattgtttcaataaatttaaaacatttcaaaaatctagaagacaaatacaatagttggcagtttcatttatgaaacatttggattttctgaatagcaaggcataagctggaccacgtattccctactttctttttaattacatattccatcaaccagtatttataaaataaaagttctcaaaaacatccttttgagttagcctgtaattagccatcaggcaagtgaaagccaagatatggagtcgaaaggtctgaattcatgtatcttgtttcatttgtttgttttataaacttggagatctgactttatttctctgttcctgaaatcctaatctgagaagtagatataattcctattgggatatttaagtgagattatgtaagtaaagaaatttttcaagctattaagattagaaacatgtgtgtcatcaattcccaattttagaagcattctccaaatctagtgtagtatgttttttcagtgacaatagtcagtaatgacaattttcagaatttttagtcaccctctatgtttttcagattccctttacctctttttactcttattcatgattgaaaatatctgacaatattttagattaaggaaatgttacttaaagttggaggtagaatgtatgcaaatctctgtcataattttcgattaacacatggtaaatacatgtttagatagtgcagtgcaggctgggtcagtgaggcatgacaggtagacctagctctgtgccaggtgccattgcagtgcttgtaacaaattatctgttaccatcatgatggccttgtgtccaatgagccatttaaggggacactgtttagaaatgaatggattgttctgtcctttcttttcagccatttgttatagtggttgcactaattttccaaatcacttaaaaatctgttcccagtataaatataaaatataaatgccattctgttacagttcaatggtgtacttagattctttcaaaatatctagaattttgtctgcatgcgaaagtcaggatgacaaccatcctgtcgcctgcccctacatcttccatcggataataacttctacttcacttaggacatgaatgtgattcttttccccaaaagatgagtattacccttgcttctttatgtaaacatctacattcctgctgccatcagttatttgggtaaaggatcaggcagacatattcataataattttatagatagcttattgagaaataaaacacatcagaataatctgcatcaaacaaacactttctaaaattatctttgatataaatggggtaaaaatcttcagaacttgtatagaaaaaaaaacaatttccaaggcgatttcagaataagctccttatttctgtgaaatagatttttctgtttatactcctcttaggctggataatatttttaaagtctcatgaattttaataagttgagtggatattccagatccttttgcatatactgtaatgcatctactagtgaattttgatcacctttctaaatacacatttgtatggtgagattctcattttcaaaggtcatgaggtttcttgggacaatttctgagactcaatattgtacataaatagaactgttctaacaaatatggttatgtgtttaatatttttctaaaatttggaagataaaaataagatgctgttgataatattgaatatattattggcatatattatgagataaaggaaaatgttataatctcataagatttcttacaggctgtaaaataacagtatatagttcttcacagtataatgtatttttcatctatgagataaaataggatatatgtaattattcttctaatgtttaaagtatccatgaaacaagatttgttatcaattatactaatattttcaggtgttttattttacattgaactcaatgctaattttttttacgttgaactcaatgctaattttttttacattgaactcaatgctaattttttttatcgtgtcaaggttggatttaggttacctgaggctaaataactccaagtaaatacatagttatataatgtgttgataaatgggtacctacaaataatttgaataagatatcagttccttcttttaagatgtatgtttctactctgctcaagtggtaacttagaggaatactagtatgcttattttgggaaatttagggcacagtaaatcatgcttcttatgtgcctggagacgcctgagaggccgtggaatgagtaattctatgttacactctggaatcagaccacctaggcagattatacaattttggtaacatagatctgtgtatcttcacgcagattctttaagctttctgtgcctaaagttcccaacctgtaaaatgggtctagtcacttacctgaatagtatttacctcaatggaggttgtaggtattaagagaaaaagtcaaacaaagggtttagagcaatgtctggaacatattaatcactcaattattttatacatttgtgatttctaggtgcattaacatagtatattggctcttttcttgaaaatttaaaatagcctgttacttccactttataataacgtttttctattagtgtattggtgtgtgtactgtattacatacatctgtgtttcccagcctggaatgacaaatgactcatttggaagtataattgagaatgctaatttatgccattcaaatcttgggcctacttattatcacatcgagtcctatgccttgtcatatgaattgtgcctggaaagttttttcagatatatattttttaatgaaacttcagtgaaaatatgactaggatgttttcattagacttagtttaataaattcacttgataaagtgcgttaacttcggaaagaaataacccatttttgtctacagtacttctctgtgtcttcttaggccaactgaaaagggtaggataagaagacttgaaaataggcttataagtattaactaaaacagtttatgctggttagccatgaaaggacaaatcagctgcaccaggaacatccaggagcttgtcagagatgtagaatctcagaggcttaacccagatctactgatcagaatctacagtttaggaagactcacaagtgattcatatatacctccaagatagagtgtgttgcttttgatatttgaagaactctcacgagaaagaggaataagcatcagcatttgtgtttccaaaccagaaggtagaattagaataactggaatttacagtgcaaattgcagacagatttatcgtgaaaaaagagtgagctttgataaataggcactcactgagcacctactacttattgaggctagggataaacagaccaaaacacaagcataattgctgtcttctaggggtcaataaactggtgataaggctaaacatatacaattataagtatattgtatgactgttcaaatagagaggtgcttgcctaggttgttttgggaacactaggaaagtggtcttattcagagtggttgggtccagcaaaggcttctttggagctacctactattggctaaataggtaaggagttggtcactcagagaagaggggcaggaagtcattccaagcagatgaatcttctgctgaaataggtaggaatggagagtgggattctataaataactgcgtttttcctgactttctgacatgcaacaaaataaaaagctgacctttatctatttatttagagacagaatctcgctctgttgcccaggcttgagtgcagtagagcgatttcagctcattgcaacctctgcctcccaagttcaagggattctcctgcttcagcctctcgagtagctgggataacaggcatgcaccaccatcccatgctaatgattgtatttttagtagagacgtagagacggggtttcgccatgttggccaggctggccttgaactcctggcctcaagtgatacacccacctaggcctcccaaagtgctgggattataggggtgagccactgcacccagcaaaaagctgactttttaaaataaaaaaaactctgaaattatatcctgtgaatcagtaatgcttaatttatataatgtaaatatctaattttggaagaaccttggagtttatgcagtcgcctagggcacatttttatctctgtgccattcatcatatagagctcactgcagagcacaaaacagatgtttatgagtttacaactgaactgaagtatctcattctgtagatgaataagctgaggctgagaaccatgatgtcccttaaactggaaccttgaatccaggtatactgacctcactactgaatatggagccaaatacttattttggttcagcaagaagttccattactataatgaacccctgctcattttgagtaattgaaaatactattgaatacatacacgatatttatagaacaagatagcatgggctctggaccggacctcaaatatctgaactctgctccaacactttctcgtggtgtgtatttaactatgttaatcaacctactatgggtcttagttgccttaggtgtaaaagcgatataattgtatttaccttatgcgatttttgtgagaaataaattaatcaaaaataaattgtttagaacaatgccccataaatatagtctcttcttatcgtcctcttgtttcactttctcctatttatcagtattattacgaatgctatcattaatgtttctcaaatactatattcaaagtgatataaagaatgcaagtaagtagttaatagtaggtctagccttgagaataatatattttaattggaaggacagcaaaaatcactacaataactttaaacaaaagcccgggtcatcttgcacagctttcaggatgcttatgcccctggacaccgtgaagatacccattctatgtgtttcacttatgcatactgttttccaggtagctaatttagtcagtgttgactttgggagagaactactagaatgttaaaatgtcttggcaaataaatttggtttgcttgagttaaatagcttaattataggctgcagtgaaatgatcattctggcaaaaagatatagtgctgacaggctgtctgaaaggttcattcaccatctatgccttttcagaagtctagagcaagagtagagaatagactttggcttctagaaaaaattctgtccatttccaaatgaaaataatgtttgagataagtatctgcatttctccgatgaacttcaccaatatattttgatgagacagtgaatgggcctattgtaattgcaatttaaatgctttataatgatattaatatgcagcttggaagatgtctgtgaaaactcctgtgatttagcagagaaattcagaaaacttcagctgcacaaattaataaataataacagccaaccaacacttattgggggttccttaagtgtttaatgtgctttatatcatttaatcttaaaaacaactaatatgtgaggatatagattattatttttatgattaagccctatttttggctgcagaaattgaggattagagaaagtacaactttccctggggtacacggtgggactgggtaatggatgtgttaactaacttattatggtaatcatttcacaatatatctctgtatgaaagcaaaaaaaaattgtaatggttgaataaatatcacatttcctgttttaaggaacatacccgcaaaataaaatacaaataaaaataaaaaaaactaaactaaactaatcaaacagtggagctaggataggaaaccaaagctacctaactaaccagcctgtgttccttgccactatggccctggtcagccattcctttcacaggcaatgtgaaacttagtgatctctgcatttaaactgtaatatagcgcttgtatataagatgttggtattttatttattttttatttttatttttttgaaacagagtctcgctctgtcacccaggctggagtgcagtttcccaatctctgctcactgcaacctccgcctcccaagttcaagcgattctcctgcttcagcctcctgagtagcttggattacaggcacctgccaccacacccggctaatttttgtatgtttaatagaggtcgggttttgccatattggctaggctggtctcgaactcctgacctctggtgattcactagcctcggcctcccagagtgctggaattacaggcatgagccacggcacctgggcttttttctaattttcaatacaaaaattgaggttcaggatcttacctaaggtcacagagcttaaaagttagaagatcttggtctttaatgctattgttggtgttgctgttttcaatttttaaagaaagtactatttacctactgtattagtttgctagggctgccatcataaagtaccataaactgggtggctcaaacaacagaaatttactctctcacagttctggaggccagaagtccaatattgaggggttggcagggttgactcctcctctgagggaggtgagggaacagcctgctccaggactctctccttggctcgcaggtggttatcttctccctgtgttgctttatatcatctttcttctgtgtgtgtgtgtgtgtgtgtgtgtgtgtgtgtgtgtgtgtgtgtgtgtgttttgatggtattgctctgtcacccaggctagagtgcagtgatgtgatcatagcttactgcaaggtccaactcctgaacccatggatcctctgtctcagccttctgagtagctgggactacaggtgcatgtcaccatgcccagataattttaatttatttattttttgtagtgatgggtctcactttgttgtccaggtgggtcttgaactcctgagctcaagcagtcctcccacctcggcctcccaaagtgttaggattgtaggcatgagtcactgtggctggccttgtttttcattttatatggcattcattttacaaaaaatttatttgtttagaatccactttactctggtatgacctcatattaactatacatgtaaagaccctgtttccaaatatggtaacattctgagacattgggggttggaacatgaacatatgaattttggggggacaaaattaaattcataacaactagtaggcaagtactttataaagttatgacattaaaagttatttgctattgctagggtgttgataggggtgtgtctggtaagtaagaataaggatgatcttgtaagaaagacaatatcttctaggaagagttgtgcatcaaccttcattaactcagaaaatatgcttgaatcaaacgactacttatatatgactctctgcaatcatttatttacattcaaaactccaaggaaacattttcagaattattctatcctagatagcaaatgaaccaaagacactttaagaatcaatctcccaccccgtccccaaagaaatgtttggccttaaaaatcatgtcctactttcaaactccatacagtagtttattctgcactaggcaccatttaacactatcaacatcatgtaattctttgagatatagtaattatttattaaaaactggattccagcaaacatgcattctaaacaatgatggataatttttctatcagcaaagaaaagagctcgcccagagccaaaacagctttccccaattaaaagttgaggttgaattgctaatttcatttggattatactagtatctgcttgaaaatggcaggtttcattagttctcccagtattcttcagagaaggttaagaaacacattccctccacttcagatatgaaaactgagttgcccagggtgaagtcgttgtttatcttatgcacttagcaagcacaattgttcattctatacgcacagtgactgtctcgtttgtgtatttttcagctttgttacagtatacaaattggaaaacagagctgtgtatgacagcctagagcaagagaaaaagactgtgaatttatcataaagtcattcaggctctttacattcagcctggaacaaacaagtatttgataaaagaaaccagaccaatacaaaagaaacgtccagtccctttggaaagattttgtgattatgacatagcaggaatatccaatgagtttttcacatgatatgttaaataaaaaggtatgattacatatctttaatatgacagcattttcttgaaatattaatagaagtattgcactttagctttacttaatgtaagcaggaatgccaatgatgttggtttcaaattttaaaatcaaaaccaaaatatgattattcaggtatattttatgttaggatttgggataactgattgtgaaataagacacaggcacatgtacacacacactctctcaactcttactacacactaactattaatctccccccaaataatatcaaacctatggatatttaatggaatttaacctatttcttagcttattcaattgaagtgcagagatgtttggcatttttactaaaatcaaatatcattgccaatagtaatcaccatgcactgagtacttacctggtaagcactttttgtgtcaattactgtaacaagatcctgagaggtaagagaccaggctttttccttggctttatgtcccactagtctttgctttctctattataccatatttaagaagatatcatagtttttgattataggtgagttgtctgaggggtttattttgtcctgttaaatgctgggtctcatcagctaggaaagtgccttgactattgaatgtatttagtaagtacttgttaacagatccaccaaattgtggaatttagtgaacattggaatatgcagctataattaggtttacaatttataaacaataatgtttattatcttaatttatacttaataatattgagaaatactgcatgtacctacatctattagaagtcaaactgtccaaaatggcatgtgtgggaacacatgaaaagcctaggatttctataggagagaaaacaacagagtttgcagcaacagggagatgagaaggaggctgggaatactgactgtagcagcaaagcttatcctcccttcagacctggaggcagcttgatgctgctgagtgtaatggcaaggaactggtgccaaaggcatggatgtgtggcaatctccaatccaagctggaccagggtccatgtggttagtaatctagatggtggtttcctctgttgaagggtcatggctagaagaggatacaaagaaattttagaagtgttgataattctttgtttcttgacttaagtgcttcttacacttgtgcaaatgcatcaagctgtatgtttatgtgtgcttttttcctatgtgtattaaaattcagtgacaagttgtaaaaacaaattaatcagacttggaatcaaggtacacctctgatggaagaggaatgaaagaaaccaggaactgttattggaatagctctctagtaccaaagataattgtgggagaaaaccagtgggccaggtgaaatggtaaccagagagcttagcaaagggtctttaagagcctacttgcaacatatagggacattatgttactctttatgtaaattcagcatgatataagtacacgggatctactcacacttagtacatagatacttagtatagcacatagtattatttgctgatgaagagggtatttctaaagaaatatgtttggatgtcattgcctctggtttgaaaagaaatgaatgtatatgaaacaggcatcattgtgtgcagttggcatgcacagggaatgacaggtaaaccaagctgtggctactcctacttgcttttgattttgtgtttgttagtattatttttgttgttgttgttctatttgcaggatgaatgcctaaatttattaatcttatttttgtattataattgccatctatgtataattgatgctaacagagaaaatttccatgtctataatatctaccaattaaaattgagaaaatatagaaacaggcaaaaacatgaaaaggaaactcaaacaaaatatataaaattgtgtttacatgcatacaaatgtaaaatgaaaagagaaatacaaattaatcctctatggggatactatatctcaccaatcaggttggcaaagaccgaaaaggttgtttatacactcttttgggaagaatctggggaaacagcattctcatatactcctgatgagcatgtccaatagaacaatagctatagagggggattggcaatacccagcagaactaaaaatgcatttattcttcaacccaactatctcaatactaggaatttagtctaattatacagctccaataacataaaaagtcatacgcacaaagttatttcttgccattgtatttgtaattacaaaatattggaaactatctttatgatcaaatatagattggttgaataaactaggctacatatttgaaatagatacacagcagctgtgaagaaaaccgataaaatataagttgacatggggtggatttgctggatatattgtttagtgaaaaaaagaaaagtacaaagagcgtttattgtatgttaacttttgtttaagaaagaagaaatgaggaaacgtatatatggttgaagcatttctgaacatatttaaatgtactgtaaattgagcaaatgagtgatatgtcaattgtgttgggggccaaggttctcaccatgaaggaaataagaaacatacgtggaatgagagaagacaagaatgaagcctacttaaaaatatatgtgtgtgttaatgagtatatatatatatatatatatatatatatatatatatatatatatacacacttacatactacatgctaagtagctctgacagctggatggatctagaaacaaaaatattgcagtaacactaagcacacctaagatagactttaattattaatacaattatcatctaaaagaaatcagatctagttagaaaaattttaccaggttgtggtcgagaaagaaacttgttaaattaaacacaccttgttataccagaaagaaaggaaaaatgatggttaatacaaaattacataagagccaacttgaaataattcatattggtcaaacctggacaatttgaacaccaaaatagttaaggacagtaatgcattgcacacctttagagaaaaatagaaatgcttaagtctatagagatgataggtaggtaggtagacagacagatagatagatgatagatatagatagatagatagatagatagatagatagatagatacatacatacatacatacatacatacatacatacatacatacataggcaggcaatagatagataaaatgaggcagaagagaggcctcttgcttatagtagaatacgaacttctgactaggaaacgtggaagggtgctggaggtgggaactcaagtcatcatttgcaaccatcatagtaaatactagttctggcataagacattaatggtaataaaagtagaggatacggagagttttgatggggagaagtaaatttgtatagtcttaaagtgtctcttacaaatcacttattagttgcaagggaaatgaataatatttacacaagagaaattaaacatcttgagtgggtaatcaaaataaaaattacagatgagaagcagacactgtgcgcctccagaggcagtggactgagaaggacccaacaccgtgcatgtagtgtcccatgaagaatgtaagtggatgtaaacattatgagaaaacaaaagtcaaaccaaaattgaagaatattctatgaggaatgttctactaaaaagataaaggagaatacattgtctatgtatcagtgtgataagagacactaaaaggctaaggagttattctaggtaaaagaaaattaaagggacatgatacctacctgtaatacgtgatcctagcctggatcctgtcttggataagaaaagatgccctaaagacataattgggtcaatggataatattgggatatggaaggtttattcgatgtagcaatgttaaatttcctgaaattgataactatatacttacctacatatgtccttatttgtatgaaatgtacactatttggaagtaagtgaacatgatatgcaacttattctcacatggttcagaaaaaataatgtgtgtgttggggtggtggaaaaaggagagagaaggagagggagagagagagagagagagaatgataaaccacatagcacagagtaaaatagaagaataagaataaagagtaaaaggacaagtgttccttatactattattgcagcttttccataattttgaaattatttcaaaagaaaagttaaacagatttaatatttccctgaaaatccagcattagaaacacattaccacagcttgtattcgtttgtttgttttaacagggtattctttcaaaaccagattgccttatgtgagtatataaataaacatactaatcttaaaccactaattgaaatctgtattagtatatttaattggatctttccattaactagctaataagtggtgttctccagaaaatagagatttgacttgataaggcagaggaaaaagaagttagaccaagagaacgactgagaaacaatgggaggggcaatgagggacgagagagcctccatcccgtgtgggtgtctgaattgacaggagcacgtggaatataagaaaaaagacacaccaatctatcaatagacagtgttatctaggactattcctgatgtaagtgatgagtagtcagctgctgttttgtgtttggttctatatcatatgttcaaagatactaccaaagatgtacacatagaacactaaactgtggaatcatatttgtttcacaggatttgtaaggtgaagggggtgataagaatttcctgaaagtcaataaaactgtgaatatgctttcaggcatggagaactcaaaagcaccaacaagtcacacttatcagaataagtttgaaagtggaaagaaagaagacgtgacattagcttaggacaattggatatttcaaaacatatgtaggaaaaggtgctaagggccttgacagaaggaaataaatcacaattagatcttgttctggaaaaatctgctaagatctacggtggcaactcaagtctgaggaggacatgaaggttttctcttgccagaggagtacttagtgttccttggagagagttgtcaggcaaatatgatatacagattctctgcactcatttgttctgtgaagatatcaaaaagaacctgcctaaatgagaaagagatttttatctagtggaatgggcttgcactaaatgttgtctagtttccctgccaacactgacattcttgcattcatcctaaggtaaactgttttaaaaagtttgcaccaggcttcgtggctcatgcctgtaatcccagtactttgggaggccaaggcgagaggatcacttgagcccaggagtttgagaccagtctaggcaacatggcaaaaccgtgtttctacaaataatgcaaaaattagccagacatggtggcatatgcctgtagttccagctcctcatgaggctgagatgggaggatcacctgagtccaggaggtcgaggctgcagtcagccatgatcacaccattgcactccagcctggggcaacagagtgagatcctgtctcaaaaaattaatcaattaatgaactataaaatttagctaccccatatgtaatatcagttgctgaaaggtagtcatatttataaatcacatttcatttttttgcatttttattataatgtaagcttattatttaatattcttctcctttagatataatttgtcctacatcatttatttgaagtaatgttgtacatgtcagcataaatgcctttctttcatccttaatacattcagaataccagggagaatctggcattggagaaatgataatgtaagggttttacatgacacatcaggaaattcccaaactttcataagaaaggcccaagtgctgacactatatgttgactcaggtcctataaatgaaatcttaataaagcaattgagattgagaataaaggtaaaattttgaggcaatataggcaataacattagaatttcagggttacttcagcagagattagaaaatgtgtttcaatttcctcaacagagaacaagtcaaatcttaaaagaagagcagagtcaacttttattttaaagagcatcactaaactgattaatggcacttaaatgtgtctgttgacagaacaccagtaacagtattatgcattagcccctatagttattgaaggagctgcatattttttaaaattccagctattaaagtcaaattataatccttgttgggtgcagtggctcacacctgtagtcccagcactttgggaggccaaggcggttggatcacctgaggccgggagttcaagaccagcctgatcaacctggagaaaccctgtctctcctaaaaatacaaaattagccaggctgtggtggtgcatgcctgtaatcccagctacttgggaggctgagcctggagaatcgcttgaacgcaggaggcagaagttgcagtgggccaagatcgcacaccgttgcactccagcctgggaaagaggagtgaaattccgtctcaaaaaaaaaaaatatatataatcctaactctgagtctgagacctaccctgactctaagcttaattccacctccaacccaactcaattgaaaacaaaaatacaggaaccacaaatcataagtgattgaagaagagaaaaatattgcacgtggtatctcagtgagtaaatagaaggaaagagaaccaaagatagagtaaaaggaaatgtctaaattcagctgccgggctaggaaaatatgaaagagaaaaatttaaagaaaaccaatgtggtcagcagtaagaggaaacctagagtgggggaggaagaggatcaattgctttaagaacaagagacttgagattacctttagaggtgggttcagctcaaaatgtgaaacaagattttaaatagagtggtaaaaacagaatgacataaatacaaaaatgtggtaagacttttatttaacaaatatttatcaagtttatttttattgttcagatgttacaatgagtaatggatatatatagactccaccatcatgaccctcatggagattagagctagatagaatataaaggtgtgattatgcagtatgtttttaaaaagtggttgagggtggtgagacagagggagagaactaaggcagtggtagacaagaagcttgcacaccagggaggttgctttcttttttatcttttataggccaggcaaaagtggaacatgtctgtaggtaagaggaacagtgaatgcaaagtctctgagggtggcagggtgtgtggcctggagctgagaggacaaaggcatttccattgacagagatcctgctatgtggcaggcagtgtgccaaataccatttggttttatgaaagttctagaacagcccctgcagttcaataagtacacaaactagatagggacatatttatctgaaagaaaaatggatcatattgatctactcatccctatgaagactgaaaagaggatagtctattgtggaaaaattattttaaaaattaatgttagtttaaaatgtattgtcttaacctaaagaaagcatctacattcatttaaagtatttatcaaatgattgaaaaaaaatttcttggaacagaaaaaaaaaacgcattattgacattctggttttatgggtccaagctgttaaaatatgtataccagggtcttaaggatagaatgagccctagaataataataacctcctttggattaagataattaataaccatgatgtctatttgtttgtctgcttttgtaccccttcttcctactggatgccagctctcatatttatcactgatagaacacaaatggtaaaattataggctagaatttttttcttgttgtttgcttcttttcacattatatggatttccgttttaatttattttcttttttctttgtttgtttggttttttgttttttgagaccaagcctcatcctatttcccaggctggagtgcagtggtgtgatctcgtttcactgcaacctccgcctcccgggttcaagcgattctcctgcctcagcctcctgagtggctgagattacaggctcatgcccagctaatttttgtatttttagtagagacagagtttcaccatgttgtccaggctggtcttgaattcctgacctcaggagatccacctgcctcggcctcccaaagtgctgggactataggcatgagtgtttttccttaccctttcattttcttgaacacattttaaaatttttaaaaatttacaattacaatgaactgatgtttaggtgctcaacaattttgtacagttgtcttatttaataaaatcgatagaaaacttttagtgaagaataaagtattatactaatgcatcataatttctattaatctgacacttagagattgtgaatccaattcacaatccaagtgtacattgctgacacttggagattgtgaatccatctcttagcagggggtaaccataaaattcccctcctaatttaaaaactatcattataaaaaatcagcattcagtgagataggtctacaaacataaactgcttctcagtatcctacaggcctgattttcttcatcagccttgtcagggttgtgttacatcgcttcatctgactacatgaatggctaaagaaaaaataattatatgtaatttgctggattttggagccatggcgccttataaatatttaaaagatatcgtatttagcaatctgaacagagatgtatactgataatgcttgagaccttggcaactcaattaacctctgggcattggatttggaatggagggattattattcattggcaattgtataaccactgtaattaaaaagcacttgccaaccttttaattattaatcctgtggttcatcctcttgtataaaggctaacatgcccattttaccagttagtggattggggaaaatgaagggaaaatgatagatgcaggcgcggtcgatggcaatgttaagactttagaatgcaggactttttccacctgccagttcgttattcattctgattagaatcatttattctatcttaattaattctgtattttgagggttaaagtacttagcgtttgatatattgaattaattctttacttaaatctcatgttgcattccaaatacgttcaattttgtaacataaaaagagctgtagcatttggacctttcttaatgacaacaaaaacgaaaaaagtgtagttttggcaacttttggatcataacatgctatttcctgaataaatagtgataaatcacttcttacacttccttgttaaaaaaagaaaaagaaagagactcaaatgtccatcctatgacatctgggcacaaaaaaacaaaaaacaaacaaaaaaaacgctaatgacactcaatgcaaaatattcagcctccttctgaatgagaactaatctttatgcatactatttgaatgtgtaccctgggggaaaggcataatgttacttggctgtctatcaaagatatcacagacaactctcaaaggttagagcagatgcttttaatcagatgctgttttcattttttatctgagttttcttaaactaaacttggctaggaattcaaaattctgtgaaacatacatatgcactcatatttttgcacttgtgtgcagccagacacataaacatcgccctgtctgtatggttctttatggtacagtgttatagcagccactccagggtgtaatgtggtcattctggttcccccagttattaaaagtgttttgaacagattcagtaataaaccagtgttatagtcacttttgtgcttgagtcaaccttcatgcatatagatttccacttaatggcaattgtattggatttatatgttcttacagtgacctcagatacagaaataatgagtgatcttattaatttgggacctgtctaatgtgggttttgaaaaataatgatttgataacttaaaaactcctttagatcagtaattatgtcaaagtatagaatgaagagtgaacctgtatttaaagaagtgacaaaaaatttttcatatttaagtctttaaatgtatctcccaatagtaggcatttatgactgtactgaaaagtttaatgttttctcaaagaagtaaatagcataagaaaatagttttaaaaaggagctttattatagtattaactaattgtttgtttataagccttatctgcttcaacataatcatgctaccaagaactttattcaattgagatgaagagttatcaatagctgataattatccaagataagaggtatgtctttcatatgactctatgctttaattataacattagtcaaatgtccacatggtatttccacagttaacttgtaaaatgagaatagccttgattcaaaataactaattaaatacagaatgtgattcaataaaagtcactgattgggtaattaagagaagaattagaagacttgaatgaaaatatataatacttgtaatcctaattagtactatgctatttgcttccccttccattactagacatttaccaaccaagtatttaaccttgaaagaatcaaagaagcttttctgagctcatactagttcccaaatagaagctaggctatttaagatttctaaagattgaagataaaatacttgctagcatgtccttgaaatggaattatggacaaaaagtgttagttgctattatataatgaaaacacaaatataaggagtaaatccaccttaagcaaaatgtctaaatgcttagctgtatttatcaagtgcttttcaatattttttcttcctccttttctgccctctttgctattgatagaggttgttgttaaaggtatagttgttttcttcttcagttttatttttagaattaaaatgctctaagtaaccttttttggtggccattatttgacattttaaaatatgtacctttctatatgtataatatcattcagtgttttattcttctctttaataatgtagagcattagcatatttaccaagacataaaaattacaaaagaataaaattagagatctatatttataatgaatatagacacaaaaattaattagaaaagtaaatccaataatttttatataaagacaataccttatgaataagtggtatttatcccaggaaagtaagtttggttcaatattttaaaaaatcagtaatgcaaatcatcatgattatggcaacagatataaaaaaatcatttgactaaatctgacattcataaaatgacaaagtgttcttaacaaaaatggactggaaggcaactacctcaaattcataatggtcaactataaaaactcacagctgatggatgcagcacttaatgttaaacaatagaatattattgatttttgaatgagaaaaagatatgtttttacattttatttaatattacattggagattctagccaatgcagtaagaaaagaataaacagaagcataaagattggaatagaagaagtaggcctgtctgtgttcatagatgacataataatttatttaggaaatcctaatcaatcttaaaaacaaaactactgaaagtagtcaggctgggcgcggtggctcaagcctgtaatctcagtgctttgggaggctgaagtgggaagatcacttgagaccagccttggcaacataataagacctttcctctaccaaacaaagcaaaacaaaacaaaacagaacctgcagggtggcaggctcctgtggtcccagctcaagtggtcccagctcaagaggctgaggtaggaagctcatttgctcccaggagttcaaggttgcagtgaggtatgatcttaccaccacactccagtctgagtgacagagtctatctaaaaaaaaaaaaaaaaaaaaaagtataaatttaacaaggcaacaggttataagattaatacaaaaaattctatatgctagcatcaaatattcggaaaatgtaatttgtaaaaggaataccatttaaaataggaccaaagacttgaaatactaacagttaattataataaaaattatactgacattctttactgtaattaaaaatactctgtaagaaactaaataatagctaacacaatggagagatacataaggcttattaattgtaaaatatgttaacttgttcactatcttcaaattgagtaggtttttaaatttacaaggtgattcaaagtttacttgtactgcaaaaggcctaaaataatccaaactgggtttgaaaaaaattggaggaaatacaagaatttcaaaaattactataaacttataataaagatagtcttgtatagctgtaaatataaatatatagatgaagagtccaaaattgagtccacaaatagactcacatatatatggagaattaaattttaataaagccaccaatatgattaaatgcagaagagaatagtcttttcaacaaatggtgttagaaaatgatatccatatggagaaaatgaacactgctgcttcacattctacacaaaaatggatcatgtacctaaatgtaggcaccactagttttaaacctctagaagaatataaaggagaaaatattcagccttgggataatcagccatttattaggacaaaaaagtattagccataaaaatgataaaagcataacacagagaaatcaaaatcttctattcttcaaatgacacactaagaaaatgaaaatcaaaccacatgctgggaaaattcattcacaatacacaaatacagtaaaagccttgtatacagaaacacaatgacccgttttccttgaaaaggaatccttgtactagtcatactattgtctttgcgtctgcttctcagaagatctaaatgaatacattcttcttctatttcttatcacatatattattctcagaagatccacccatttctgttattattcagaggtgccatccaaacataataacaaaatgttttacctactgaattcagtgctatttgctgtatcattccaatgttccccccgacagtttctcatctgcctgttttactttttgaaacattgggatccaggcttcaggttgatgtatctaaagtacatatacacatgcacggaaagtccaagataaaagaaatattatcaataggaaatgaaaattccaaacctttaatattaggtaattccatataagcctttataataaaatatttatctcattgttttccaaaataatttttatttacattattttttacatttcagtacatggtaaagtttagaagatttgatatttgagaaagggtaaacagtctttagctcctgcatattaataatttatttaaccactgacactaaatatgatgtgccaaataagaaaacaattagcaataatattaacattcccactgttttctcatggttaaaaataaaaagttgtgctttatttctaatttgtgatggaaaggtatgtccatgacttcacatatgattgtacctgcataacacatttggctggcacggcaagtgggagctgaaatcctttttttcaccatgtttcactatgtcaaatttaacttttgacaatttaattggaagaaatccatgtactttcttaaatatgtcttgaatattcagggaacattatttgtaatagagcagagttggaaacatttgtctatcagtacaatatttctgcaatcaattacagtatactcacatgatggaaaacaatgtacctgataaaagtaaacaagatagatgtataatataccacggtagaaacataacttcgatagggtctttcttctaaaacattgtaatatcatatatattacatatcattttataaacatagattatttttatatgtagatgcatataacaacctagaaggatatatggaaatctcttttttaatcttttactttaggtttggtgggtacatgtggaggcttgttacataggtaaacacgtgtcacaggggtttgctgtaaatatttgatttcatcacccaggtattaaacccagtgcccaatagttatcttttctattcttctccctcttccaaacttctgtcctcgagaagaacccagtgtctgttgtttccttccttgtgttcataagttcttatcattaggctcccatttctaagtaggaacatgtggtatttggttttctgttcttgtgttagtttgctaaggatgatgacctccacctagtccatgttcctgcaaaagacatgatcttgttctttttcaatggctgcattatatttcatggtgtatatttagcacattttctttatccaatttgtcattgatgggaatttaggttgatttcatatctttgctatcatgaatagtgctacaatgaacatcacgtgcatgtgtctttatggtagaatgatttatatacctctgggtatatacctggtaatgggattgctgggtcgaatggcagttctgttttttagctctttgaggaatcatcatgctgctttccacaatggttgaactagtttacacccaccaacagtgtataagtgtttccttttcttcacaacctcatcagcatctgttattttatttactttttcattgtagccattctgactggcgtgaggtggtatctcattgtggttttgatttgcagttctctaatgatcagtgatagtgacttttttttttcatatgctcgttggctgcatgaatgtcttcatttgaggagtgtctgttcatgtcctttgcccactttttaatggagtcgtttgtttttctctcataaattttaagtttcttatagatactgggtattagaccttcatcagatgcatagtttgcaaatattttctcccattctgtaggttgtctgtttactctgttgatagtttcttttgctgcagaaacgctcttaagtttaattagatcccacttgtcaattttttcttttcttgcaattgcttttagtgtctttgttgtgaaatatatgcccattcctatatccaagatggcattgcctaggttgttgtttaggtgtttatagttttggattttacatttaagtctttaatccatcttgagttgatttttgtgtatggtgtaaggaaggggtccagcttcaatcttttccatatggctagccagttatcccagcaccatttattgaagagggagccttcctcattgcttgttttgtcatctttgtgaaagatcagatggtcgtagatgtgtgggcttacttctgatatctctattctgttccattggtctatgtgcctgtttgtgtaccattaccatgctgttttcattcctttagccttgtagtatagtttaaagttgggcaacgtgaggcctccagccttattctttttgtttaggattgccttggctatgcgggctcattttggttccgtatgaattttaaaatacttttttctggttctgtgaataataatcttggtaatttgacagcatagcattgaatttgtaaattgctttgggctgtatagccatattaatgatattgattcttcctatccatgagcatgggaggttttttaatttgtttgtgtcttctctgatttccttgagcagtgttttgtaattctcattgtagagatctttcaccatcctggttagctgtattcctcagtattttcttctttttgtggcaattgtgagtgggattgcccttctgatttgcctgtctgcttagctgttgttggtacccagaaatgctaataatttttgtgcattgattatgtatcttacaactttgctgaagttgtttatctgctggaagtgcttttggtctgagactatgtgcttttctagatatagaatcatgtcacctgcaaacagagatagtttgacttcttgtcttcctatttggatgtgctttatttctttctcttgcctgattgctctggctaggacttccaatcctatgtggaatacaaatattgagagagggcatccttgtcttgtgtcagttttcaaggggaatgcttccagcttttgcccattcagtataatgttggctgtggttttgtcatagatagctcttattattttgaggtatgttccttcaatacctagtttattgagagtttttaacatgaagtggtgttaaattttattgaaagccttttatgcaataatttagataatcatgtgttttgttttttgtctttaattttgtttatgtgatgaatcacatgtattgacttatctatgttgaaataaccttgcatcccgggcatgaaacctacttgatcatggtagattcgctttttgatgtgctgctggtctcagttttgtattagtcaggattctctagagggacagaactgaataggatgtatgtatatttgaaagggagtttattaaggataattgactcacatgatcacaaggtgaagtcccatgataggccatctgcaagtagaggagcaaggaagccagtagtggctcagtccaagtcccaaaaactcagaagtagggaagccaacagtgcagtcttcagtctgtggccaaaggtccaagagccccttgcaaaccactggtataagtccaagagtcccaaaaccaaagaacttggggtctgatgttcaagggtaggaagcatccgtcatgggagaaagatgaaggccagaagactcagcaagtcagcttcttccaccgtcttctgcctgctttttctagttgcactgtcagccaattggatggttcccacccacaatgtgggtacgtcttcctctcccagtccactgactcgaatattaatctcttctggtaacactcagaaacacccagaaacaatacttcgcatccttcaatgatcaagttgacacttcatgttaagtttatcacaaatttgcaagtatttttgctgaggatttttgcatcatagttcatcaatgatattggcctgaagttttcttttttgtgtgtgtttctgccaggttttggtatcaagatgctggcctcatagaatgagttggggaggagttctccctcctcaatattttggaatagtttctgtggaatggtaccggctcttctttgtacacctggtggaattcggctgtgaatctaccaggtcctgggctttttttttttggttggcaggctatttattactgattcaattttggagctcattattggtctgtttggggaatcattattcctggctcagtcttgggaggctgtatgtgttcagcaatgtatccatctcttctaggttttctagtttgtgttcacggaagtgatcccagtagtttctgatggttgtttttatttctgtgagatcagtagtaacattccctttgtcatttctcatcatatttatttggttgttctctctttccattagtctagctagtagcaaacattatgaaaatgaatttagacaagatactaactttcaatgtgaatacttctatatattcaaagttttaaacaaatatgagtttacttataatcaaatatatgttttgtaaattgctgtgtggaaatcagaggctgctcatttctcattcaaactaacttaaagatactatgttaaatgttctacaatcataactttaaagttgttttctctaagagtttgaaaaagaaccagtatttttgaggttgtgtcaatagagtcatgattaataacaagcataataaaaatttttattaaaaataagcaattaaatattcttcttttactatattaatgctcctgagaattataactttctaaacaatttaaatgaaacatgagcttttaagcttatagtaggtgctcaaatgtttaggaaaaatgaatgccaaaaatagctatattgtttattcagtggaaggaaaaaagactaaacataatttttacacattgtctgtttatacattactttgctaaaaacttacaaatagatggactcatttattttagagatctgtgtgtgaaatgtattgaaatggattataacatttcccaatgggacacatctaccagcaaagcatttcaggagtgattttatgtatatgtgacgaattaggcaacttatgcttgaaaatatcagaaatattaaacaggcacatctaggggcatttaattcttaccaattttgttttttcctgtctcttaagaaataagagcagggtgtggtggctcacgcctgtaatcctagcactttgggaggccgaggcgggcaggtcacctgaggtcaggagttcaagaccagcctggctaaaatgatgaaaccccatctctactaaaatacaaaaataaggcgatcctaatggcaggtgcctgtaatcccagcgactcaggaggctgagataggagaattgctcaaacccgggagatggcggttgcagtgagcctagattgtgccactgtactccagcctgggtgactgagcaaggctccgtctaaaaaaaaataaataaataaattaaataaataaattaaaaaatgatatagctacatgagctcagtcatcaatgataggctagaaagagtaaattacaaataacaaaaattactatatttaacaattattgtaaactttgacatccatcttcttataatatttgcaataaaatatattttcaatgagatagtgacatggatgtatttttggttataaatcatatgatttattatttcaaaaaaactatccttaatcattaacagtaatgtctttacattgagaaactatgcaaatctcagaatatttgtctcctaacatgttttatgagcataacaaattcaaaaaacacagaactataactcttttgttttacaacttgatacatcacatattgctattctccaaagatttccttcctaattatgttttcttctacataatattaaagttcattgacattctcataatacacaacaggatgtctgcatgaaaattgcctgcaagcaatgttggctgatgggagaatgctagcttatattaaaaggtaactattatggttttatcaatagaaagaaaaagagttaattacattggtacttatctctttcccttttgggccagttaaattattgaattttttttttttttttttttttttggtaaattgaattcttcatgggaaggtacgtcatccacctgtatgaaaacagatatcacaagaaaaaagtatatatagaccaccccccaaaaaacaaacttaataaaactatgtatttcaaatagaattatttttttctggttgaaaaagaaagttggaaacaaaatctgtgacaaaacccaggctttgcctgtactttaacgtaaaccaatgctgcactttatgcttactattttgttgtcttgtaaggagaatttctagagggtggttgggttccatgcaacttaattgtaagtgtcagctgaaagacctacaaagacattgtcagttattgagtttcttatcaagccaataatgtggtacggctgttgtactaataatgaagttttaattagttctcaaaaatactgagagcttatttaaggcctccaaattggatagtgcatgcttagcttgaaggcatcaatgcatcccaaacatatcaaaataactgtcaaacacattgtatacacattaggagataatagctagaaggcttaacatctatcttagaaatactgtatgcacaaattgttcaaggaagttctttctacacttaaatgattgtcttcagaatattgtattttataatttaagcaaattgtcatgcaaatggttcagtgttatctgtttatctgagggtcagtatagttgagaaaattcattttagccaatgtttatcgttattccaaatgggagcattctctattcataactatcccaacatagcacctgcatttttacttataaatacttattgcttgtttccaatattttactgcatgagaaattgtgccagatccctcttccctaatccatgggtagttcaaagatactaacatttaagaaacagttgatttaaacttctaccattggagaattgttgatgtcttttcaatgcattgggtggatttagaccactgcattcttatatgcctgtctattaatgctatacaagatgtctggtttaaactaacattactggaagtaaccctttctaccccatcccatctccacccacacgtctacaaaaagaattttatgcaagacagattttgaagcacatagaggaggagctaacatgagttgctgctagaaaaataatagctgtgttatttgtactgacagtttgtatttcttctcaaatcatttattttcacaaaattggtctggctcttattttttcaaaggacgtaagctacttcattgttgttgttatggatttctgatataatgacattaattacttgctgtgtgccagggacttttttaggcttagagggtgaaagtgtagaactggaagtgcatgcgattcagaggctgcacagtgaccctctgtgggtaagaagtgggctcctagagtatttgaattatgaatgcaagtgggtcaagggaatgaggaatggggtgtatgagaagaataataagcatggagaataggacatatggcttgtttcggggaactacaagatgtttcctatttctgtatcacaattacatgaggataaagggagaggcccaaggatataatgattacaatttgagggggaagtgtttactacattcagagagcctgggtcatattctgttagtacatcatgtttttcgtcaaattttgagtgactattatgtggaggtggaggatcttcttttgatattgatttaaaaatattatttacaaagatattatatattttcttccaagaaaatatagcttatattatacctacaagagttcatgatttgtagggggcaccaaattaagtcggaaatgctaaaatgtcacacatttcaggagaaataaatcagaaagaggtgggtttattggtgaaggatcaatttgatgcatcaaaaagagggttactcttaaattctcgggagaagtgaactcaggaagaaggaaatatcaagtctgacgttaaaatctgatgccaggaaataggaacttgtatataaaagatcctgaatatagctgatgtttaggaaaagtttattaaagtgaattcacctaggatagaaaacaatatggtataattagtagttaaaatgaggatctattagaactttgtctagataaacaaaagaaattaattcatgtttattttttatttttattttattttatttttttgagatggagtcttgctctgtcaccaaggctggaagtgcaatggtgcaatcttggctcactgtaaccgctgtctccagggttcaagtgattctcctgcctcggcttcccgagtagctgggattacaggcacctgccatcatgcctggctaatttttgcatttttgtagagatggggtttcaccatgttggtcaggcttttcttgaactcctgacctcaggtgatccgcccaccgtggcctcccaaagtgctgggattacaggcgtgagccaccacacctggcctcatgtttctttttataacagaaaattgtaattgtgtgactgtgtaacaaaattgtaattgcagctatacttcagttcttcacttaaattgtttgtcaagttttgacatgattctttcaataaaattgtatgataacacgacttctcattctgcttctgtggcattatcacctgaaagtcatttctgcaaagaattatttcagagtcttatcagtttcccaattagcgcttttgtttattttatattcaaaccattttatttttaaaagcctattgtgcaatcattcttgccaatttctcttgatcagaataggtctaactgctttgcacatgttttgaactgttctacatcaacgtcattaactttggaaagacctccttcttttgtaaaatttgcaatttcattattcaatttacatttatttgcattataagtagcgaataactaagaatatattgacatgaaagacagacataggctgaaaggcaaagacaggctctagtgtaaaaaggcagaaaaggatgatttaatggcatctgagattgtaagtggcattttgttatacatattttcatgagaagctgaatttggttctctacacaaacttataactgaagggattcagataaataattctcctatatggagggcctctggaataaacaagattatatcttaggatctgactaaaatggcctcaatgttccccacagcttgattaaactttacacaagctgctgcttaaatctaggccctgacctcccttttcttagagcattccctttagaaaactagtaattgtaaatcctttctctgactctttgagatgtaaatcttttttgaaagtgctttgccagttttaaaacacgaaactgtctttctcaaaagacctggaagccagctcttcgaaatgtaaacatcaatgaagacagagcccctgtcttccagcttctgtgggatagcaggagcctacatttgaaggatgctttgctccaaggtgtaaaactacctcctaagaggcagtttgcttttggcgggggggcaaagccagttaggaaatactggtggcctaaaacccaggtcctttatgacctaattctagctttataaaaatttttcagcttggccaggtgtggtggctcatgcctatgatcccagcactttgggaggttacagcagaagggtcacttgaggccagtagttcaagaccagcctagacaacatagggagaccttatcttaaacacacacacacacatacacacacgcacacacacacacacacacatacacagcaaaaaaaaaaaaaaaaaaaaaaaaaaacaaaaaacaaaaaaacgagaagaagaacaaaaacatctttttgggggcaggagttgcagtacagctcactttgacttttggcttccctcctctcttacattaaactcctggcctgtttaactttgtttggcagattgttttggttttttgctttgacagatccaaataaaataattaaatcagtcaggactgagagatctagatgcatgttgactcttagggagttcatgggatcgtcaccaaatctattcttgcatcacctgaatcttcccaggttgaagatgagagcagacactgaaggtcatattcttgctgctggcttgtatttgctgccaagtcccccagggcatgttctttttccttctgtgaatcaggtcggatttcatataccattttgtgttatttattttggaatttttctcttaaaatagctcctccgtaaagaaagcatattgttcatatcattgtgattatgatttcagcaaaggagataaaactctataataaaataaatgtccttcctagaaaaatatttgagttgaataaaacttcagaatactgccaggaatattgtaactttcgtttgcctcaaaatgctattctgatccttcatctttcattattaatccattcaacaaccatttattaaacccttacatttgtgccagaaccttctagacatactgatttaaaacatgtattctcaagttgcaaaatcgccctccagatcaccctgggtcattggatcaacgatacaataatgtgtattgttgattatcaggtcaacaatgatccaatacacattattgggtcaaaattgttgacctaattcacattatatgtgtttttcactcaaaaagtctggaaggctcagaaaagactggaggaaatgcacattttttcctctgtcatacccatgcatattggttgttctagattagataattaagtagacttagtgcaaaaatcattttattttcatatttcactatttaggttattggtatatttgtaactttttacttttaactactgctttaagcgtttttcattgatgacattaagcatgtaagaaatgatcttaatggttattttgactatagatatcagtgtctttctcattatgtgctttgtataagaaaggacataaatatcaagcaagaaataacaaaagcattgcattcagaaacaagaacatacaagttaatgaaaagaaggtaaaacataattttttcgaccattaaaaacataggaaaggggccaggcatgatggcttttgcctgtaatctcagcactttgggaggctgagaggagaagatcatttgaggctaagagttcgaaatcagcctgggtaacatagtgagacccccccatctctataacaaaacttaaaattagcctagtgtggtgccatgtgcctgcagtcttatctgctggagtggctaaacctggaagatgggttgagcccacaaatttgaggatgcagtgagctatgattgccccactgcactccagccagggtaacagaacaagagcctgtctgtaaaatatatatatatataaaatatgtgtatatgtgtatataaataatatgtgtatactatatatgtgtgtgtatatgtatacatatatacatatgtgtgtatactatatatgtgtgtgtatgtatgtatgtgtgtatatatgtgtatatgtacatatacatatatgtatacatatatatggacttttaaacttttttagcagctctatggctttcagtgctatttggatatttactttgaatgaagcaagattatttgagaactgtttatatttcatgatgtcaccttccatgatagtttttctattataggagattctcagttcattacccgaccatgatgacaagtgaaaactatgaattattttcactaaatcaagtaatcgactttcataaaatacagttcattaatgtttcctcttcagcatattgttttaagatagtcctaagtcattttcagttctttaacataataaaatactcaatagaatacattaaaagaggattcagaacttgtattctttcattttaaaatgtctcctggaaacacaatttactttattttggtgtttattcatgggccaacgtcccctaattatgatagctgtatcttgaatactgttaatgcaaccacttcaatttgagtggtagatatcttctatttattcttctagatccactctccacattttttaccatagtatttggcaggctgctgacttctgtcagtgacattaattgacttcttgtccttgatcttcttcttccatttggccagtggcaaaccctgggaggagaggggaaggaagaaagtgatgatgtattatcttttttttttttctataatgctaacttcattttgctagtcacttaggaatatttttttacagctgaattgctgagtaagactctacattttccctttcccacaagtactcttgagtttttttttttaataagattataccagccctatgtttatgttagaaaagatgacctaaggtaggagttagaaaaccatatctttttaatatcataaagcagacgctgtcattctcttttgaaaaaattatttcactagtttaacttcactctctgaatgaagccctaactcttttaattgccaggaggcccttcataaattgacagcgcctgtttctctgaccccatttctgtggacctcccctgccctcactccactctaagtacatcagctttctcgctgcttctcaaaaaagatgagcttttccttgcctcctgacctttgcaactgtttgccttacctgccgatcttcttacgctttcttccaccctctccactccccattgaaatgtccaactcaaagcagctctgaccactttcaagaactcctagtatctctctaaccccttattttgttttactttgctataatggacacttaccttttgcgaactttatttgctcatttgtttaatgcctttcttcaacaaaatatcagttgtgagggaaaggactgtctgggttgctttcaatcacattttcaaaccaagaaacactccaggcttgtagtaactgctccataagtatgtgtggaatgaaatataatggaaagcagatgccttcataggttgactgaggcagtgtctgtgctgccatttcattgccctgtggcaggcatcattttcccatcactgcatacttgatttgatttactcttctgactattaattctagttactattatcaatagatgttggcatagatgataaacttcctttccactctttctacatttaaaaccattctggattttttaaaattagaattaaatgcatccagttatataagatattcccaacttttatatatcatgttagtaaacatgttttaaaattattttaatgttacatttgataagctgtcaagaggcagtgttgaacaactttatattgttctcttttctattaattatccttcattttctacaagatttaaataaaatatataatattaaattagcatttactatgttacagacactcttatgagtgttttacaggaattagttcatttaagtctcataacactccatgaagtcagtactctcacttccaagatatgggaattaaggcacaagtaatttgtctgacaaatgcctgggtccagaacctggcagggactgtggagctgagagccttctcccaaaatgagaacagcttgtttctacatcttagctcatgagctcacggtcagtgctcagtgaatgttatttttctttataataataaagaaaataaagattgtattagtctgttttcacactgctgataaagacatactggagactgggtaatttataaagaaaaagaagtttaatgggctcacagttccacgtggctggggaggcctcactatcatggctgaaggcaaaaggcacatcttacatggtggcagacaagacagaacaagagccaagtgaaaggggtttcccttttaaaaccatcagatctcgtaagacttattcactaccatgagaacagtatgtgggataccactcccatgattcaattatttcccacctggtccctcccacaacacatgggaattatggcagctaaaatttcaagatgagatttgggtggggacacagccaaatatatcacagataataatgaaaagtttatgtcctccacaaattcacatgttgaaagcctaatacctattgctatggtatttggaaacaggagcctatggtgattaggtcctgaagttggagccttcgtgatgggattagagcccttatagaaagaaattcataaaagctcctttatgctctctctttctgccattcgaagaacaccaagaaggtagccacctgtaagccaggaaaagggccctcactaggaacctgaccatgctggcaccatgtcggcaccatgtcttagaattccagctttcagaactgtgagaaataaatgtttgtttaagccaaacataaatacaattaaataaaacttaaaattaagtaaataaagatcttacctgagtagaaaattctacacaacagtggagttgaaatatgaacccagaggccacagatgggagctttttattacttcattatgttttccctctttatcatcccaactaaaccatttaaggagtatattttctaatactttgatgacaattaggtgtgcaagtacaaaactctgctgtgctgtgcttggttttcccatttatatattagtagaaggagaaaaacattttgtcatctctttggaaactcaaacttacagagggctgaatatttgttttattatcttttaatctgttgtctacaaaatctcaggggatgaaatattatcctcattagattcacaaggacttactaacttcagaaatgtcttcagagatgtgtttgcagaattgtggctttgtgtttgcataataaaccagcagcatttaaatgacattcctaaatctgttgaagctataatgtgagcaaaattaatatctgagagatgtttataaggaattatttttgttaccagccaagtaattattggcattgagtagattccaggaaagtcttttaaaaatccttccagaattttgagccaagtctgcattctttgcactgccatccaatagaaccctatcacatggaacaattctaattccacacacgttactctagatcttaggtattttaacctacaggaaaagccaataaaactgtattggttttctcaagaataaactgaataatctcaaatatgtaaaccaaatttttcatgttttatttgtaaaagcaggttatagaattggatgatctctaatttttcttagagctttaaaattgtgggatttattaggatatggcaaatattttcatcaaatacagtatcttatggaaacccagacatcataagaagtcctacttacaaaatcatcttaaggccctgcctgatttttagcccagtctttaattattcatgtgtgttccatttatttatttattttgggtgaggaggtgggggtcaagaccctggattgggatgaaacttcaaatgctactattggttatgttttgctaaaaatggatgttttctgaaaacatgaaaaatttatgattttttgacacaataaatggaaaatatggatatttcaaaaactaagggaaaaaatagcaaaaaatatatacaagttttacccccaagagttatgatctctgtcacttgtgcttggtgaactgatccctataattttttttttttttttttttacaaaatataaaaacacattatcttcttttattatttttctaccttttattttagagtcaggggatacatatgcagctttgctacaaaggtatattgcatggtgctgaggtttgaagcacaaatatattcgtcgtctagatagtgaccatagtacccaacagttagtttttcaactcttgcctcctccttctctccttcctctgctggtctctagtgtctgttgttgccatctttgtgtccatttgtacccaatgtttagctcccacttataagtgaagatacgcagtatttggttttctgttcccgcattaattagcttaggataatggcttccagctacatccatgttgctacaaaggacacggtttctttcttatggctatatagtattttagtggtgtatataaaccatatttccttcattcaacccacctttgataggcacgtgggttgattccatgtctttgctatggtgaatagtgctgtaatgaacatatgaatgcatgtatctttttggcagaatgatttattttcttttgggaatatacccagtgataaggtttggctgtgtccccacctaaaatctcatcttgaattgtaatccaaattataatccccatgtgttaggggagggacttcatgggaggtgattagatcatggttccgccatgctgttctcatcgtagtgagtgagttctcacgacatctgatggttttataaaggcctttcccccctcttcaccctgcatttctctctcctgccaccatgtgaaggatgtgtttgcttccccttctgccatgattgtgagtttcctgaggcctccccagccatgcagaactgtaagtcaattaaacctctttcctaagttacccagtcttgggcagttctttatagcagtgtgagaacagactaatatactcagtaatgggattgctgagctgaatggtaggtcagctcctagtgctgtacaaaaataagtagcatttctgtacacaaataatgttcaggctgagaaccaaatcaagaatgcgataccttttacaatagctacaaaaagaagaaaatatctaggaatacaactaagcaaagagctgaagaatctccacaaggagaaccataaaacactgctgaaagaaatcagagatgatgcaaataaatggaaaaatattccatgttcatggattgaatcaatattgttaaaatgaccacactgcccaaagcaatttacagattcaaacctattctgatcaaactacaaatgtcactttttgcagaataggttatgtactttttaactatttggtgtgttacataggtaccgtaactgtaaatttgttttatgtagttgtttatatagttctaaataactaatggacttgaattattttagccatggatatgcatttgtacattgtatttttcaaaatttttatttatttcaaaactgaaatacagcatattattctttacaatgttatttcacaatattccctataaaggtgtttccaataatttcagagataacttttaaaattatatttaagctcctggcacatacttctgataattgcattgcctttctcttttctttagttgctagtagtaattctcaaaaaatacgtttttttctatgtgttcaaatttgcagttattgaggttttaaagggaagatttacacatgtgtgtgcacatgcatatttaaaagaaaacagtttttattttcattggaatattctcataagaaccaaataaactttagcttagaaatttaggacaacgaagagaagattttgcgagaactcagcaaatttaagtgtttctgtctctgctccattcctttcaaatgcataagtacatacagccaatacacacacattatcatttgtgaaatgccatcttgttaggttataataaatgtactaaagagttaagaacatcaggacagaatgtttaaaaataatggctctaaacaattgatcaaaacactattttagtataaaaaattagtttctccaatttctccaaaatcatcttatagattatttagaataatttcaagctgtttttttaacatcaaagagaatgttaatgtaagttgttccactttctgctaatatataaaataatcatattatgtttgaagtgtcatttattagtttttttggaagaagccatagtttatgacctatcttggttactattgatgttcaatgaattttaagcatgtaaatagggcattttcaatagaaaagttcatctgatttctaactattattttaccagtaacaaactccgtaatataattgtccctgggtatatgcaggggatgggttccaggaccgtctgcctataccaaaacccaaatattcaagacctgcagttagctctgtgaaatccaggtatatgaaaagttggtgctcctgatatgtgggttttggatccagaaaatactgtatttttgatccccacgtttggttgaaaaaaatttgcatataagtggacctgcacagttcaaatttgtgtgtgaggttcaactgtgcttcttttcttgcatattatttatttgcaggtacattgcagctaaaattggaggaagaataaatttgacaggtagcaatggaatagtggaaagagtggtccctattttggctgttactactatacagctccttctcttcttgggcatctcgaaacctcccagtgccatcttaagaactgagtgagatgtttcctactcagtatgtattgagtatcagctatgggttagatgctgttctaagcatggagagtacaatgttccttgaggtagatgaggtcccatacatatgggatttacattcaggtgatgaataggacattgcactacaggatggggctggagggcccactggagcataagtagagtgcaacagaagacttcgaggagaaagcccatgtctaactggggccaaaatgctgatgagcaggaattagtcaagcaaaattagtcaaggaagggaggggaagtagagagtaaattactttgtaaatgataggctgctactcaaaataaaaagtacaataattattatcattctaaaaacttgtagacaaaattataatttgcttttctagctcccttaaaaatttttacagctctcaatgtcatatatgcctttaaaggtaagtctctacaagcctaatcactgcatttgataagttcaagagtttataatcaatggtggtctaatgaaattttttaaatgcatgtgtatctcccagacccccaaactaaaaatttcatggaaaaatatgtttacatgttagatgagttatgttaactacttatgtttagccaactagttgtgtggtttcttggaaaactattttcagaggacatagaaacaatgtaaataaaatgaaattataatttgcttccgaaatgttaagttactcttaacgtctttggatatttacattgttgattccaataaaataaaaaacctgcagcttacatcaaataaatcttttattttttgcataagaaaatttttaaaaaatgaattattaacaagttagtggcaagaaacgagaataccagggatccagtagtctaatgtaaataataatataggggaatgtcacatgggtaattaactttgaggcatttcctgggatttaaacagtgttaggaaatttggcaaaacaagctcttatatagctgatgtaaaaatgcacacacgttggcattgtttgaattctgccacttcctctagtttgtccttaaaaaagcaagagcaatacatgataattatagttaatataaatggatatctttaattatttaagattttaatcttacagagaaagtttcagcaattatttttattgtcttcagaacttctttttgcaaggaaagcaattagttggacatggattgaaacgagccaataagaaaacttaagtgattctatttgtcatgttttcaattaccgtattgtcttggagtgtgctctgccagtattttaacaactgacttatcacttgaagtcaaagattcttttcagcatgaattgtaaactaagcatttcaataatatgtgagtgtattttgcacaggatagaacttgtcgtgtttcattatgctctttaactctgaatatatgtaagtcggtgtgtgtgtgtgtgtgtgtgtgtgtgtgtgtgtgtgtgtgtgtgtatgtgctttccctttacatttttaagatttcaagaatagactaattctagtacaaattactctaaaacgattccttgtaaagttaacccaattgtttctctggctgcttttataaaaatttgaaggtttattcacccctcaaccctgcaatcaaaactgattttaaaagagcatctgaagcctagagctggaggaatgttttttcatgtgttttattttggtaattactttcttaatttgtcaggatttttctgactctaaggttttcccttatgctatcaattttttgttcagttttcttaaaaaaaaaaaagaaagaaatatctttataccaagatagcaccaatctcactttcaaagctgccaaaatttgccctcctacattcttttattgtttttaatgtttaattctaaaacagacaaagaaaaaaattgcagcactataattctttttggtagatatctccaatgattcacatttgtgccctggtatattcaataagactactaatctttgcctcacagatccatggaaagaataacatgggaggctattgggactgcctggactgtatgtttttttctgtttcttaatctaatattctaccaatctctctttaaaaatgttaattgatgatcacatctttttctttttaggcatttcaaattttgtaacattagtattctgtatgcttagtgtgccaagtaggaatctgcttaaaatcatcaggaaattttcataccaacgtgttcctcagtaccaaaattgtacaatcatcacatggaataagtttatctagtatagcctcctatgtcatgagtgaattctctttatgcgtgaacacgaaatggatttttctgtatttgcttgactaacacaagtgttataaactcatcattttcaagcaactcttcttgctggaaaacttttgctaaattcctgtaatttgccagtgagtgacgtctgccctgctgctcagtggatcataggaaatagacctaatatttctgccatgtaaaaacccttaactcctttatggtgtgtctgtatcccctcatgcttctctccattccccagtctccttatttactcttctatccatcagactaagtattcataaaaatcttcatttttttctatctcagatatctagatatctacatagtttttttgtttgtttgtttgtttgcgacagtggagttttgctcttgtggcccaggctggagtacaatggcgcgatcttggctcactgcaaactcgcctccccagttcagacaattctcctgcctcagcctcccgagtagctgggattacgggcgcccaccaccacacccaactgattctgttttatgttttgttttgttttgtttttttgtatttttaatagagacaggtttctccatgttggccaggctggtctccaactcctgtaatcctagcactttgggaggccgaggcagcggatcacctgatgtcataagtacatggtttttatttatctcatttaattgtaattattttacattaatatcctgcagcctgaccttcattattaataagtatgagtaaagccattgaatcagtttttctttcacattaccatttatttttctgtattttttttctaaaatttctttcagtaagaaattttgttgaaatccaggcatacggtctatattcccctgtattttctctaattgccttgtcaaaacaaacaaaagaattaagttgagtctggccttaataaactcaggctggcttcctgatatgctttttttctaaggtgttaatgcaaatttagcattttattctagatgagattgtattcacagatgtacacttcacaggtcatttccttgaccaccctagcatttcttgtataacctacaattagtcaaaaagaatttatctaagttcttttcttatgttagggtgtccacttttagtcttagagatataaactgacttagggttgttctgtatatgtttatgttatctttgataaccttgatttttagctctgactaccaagtatttaagtccaaaatttatttacttagaaaatctagccaatgaattaatctatcatccattgacattagatcattagcctcaaggaccaggtttttgtgtttttttccctcttcttactcaaacagagttccaaatctttgaaaattatataatatttctttaaacaatgttatttacaacatggtatcattttatttaaccttcattaaatatactttggttttattttgggcagaacctgatgatatctgaatagtagaactcgtgtggaaattttctcaattttataacgtttctatttttttctctccagaatattttatacatatatggctaacaaattaattttaccttactttctatcacttgttaattaactttcatttaccttttattgatatattggtaacaattgtattttactctatcatttcatatgtaaggtaacttccacatcatgtgtttttccttatcaaaaatttaaatttaactatattctaatgctttcctttttagttatcattaaattgaaataatcaagaccaccatttcctaggacctttttcacttctattctgcctacccatttttttttcatcttgataagaatttggtccagattatatagtatatacatacactgaaatattattcagctttaaaaaacaaggaaatcctgtcacttgagacaacatagatgatctggaggacattatgttcagtaaaataaaccagacacagaaagacaaacactatatgatgttacctacatgtgggttaaaaatagtaaaactcacagagagtagaagagtggttgccaggggataaggggaaggggaaatggggatatgatggtcaaagggggcaacatctcagttatgcaaggtaaataagtcctggagagctagtatcaagcacagtgcctatagctaatgatactacgttgcatattacaatttcctaagtagatagttcttaaccacagagacacacagatacacacatgcacacacagaaaataatagagtgggaggaaacattgggaactgatagatatgtttattgccttgatggtgatgatggtttcaccagcacacttatccctaaactcattgcattgtttacattaaatgtgtacagctttttctatattaattatacctcaataaagcagtttttaaaaaagttttaattagttgctttttctgtttttcaaaaaatgttataagtatagctttcttatatatatttagatatttcttcctagggtcattgaatctaaaatatgtgtaaatcttctttgatacagagaaactccagaaatatggtagaatacagcaatagacttcaggacggaggccaagtgtaaatttaaactctactgtttattaaatttgtggtcttgggtaagtctccttaactctcagatgcaagtcattcatctgtaaacagtgagattcatagacgtgtcttcccaatactaagctgtattgtgatatgacttaaacctctatattaaaaatgagctgtaatttgctttaatttactattttattctgcatggtcttcttattttaaataaaatgtacatttccattattgttttttagttgaatcgaaaccactgaatcttgatcatatctaaaattttacttttacatcttcttgttaaaattacaataccttgttcttcatcacttattcctagtgtatagactacggagaacacagaaagttttctgaagctccttcctattatattatcatataaattaccaggcatgtctgtcttgatcatactttcttcatcaatccccatgtctttcttggtatcctgttttataattttatctaggacttttttctcactccgattctaatttagatttgagtattattgatgagattggaaattctccaggcaggcattttctttctcgtcctcattaggagctctcaggtgccctagccaagcgtctatcacttgggtatattcatggtacagaaagccaaatcacattatgtgctgccagccagcaactgagacagagatccaagctccacagcatcccttatcttccaaatttccaactttcattggaagcaaagatgaaaatgccacctgtgtcccaaggtccttcatatttaaaaagtgggaaaatgtattaaagatatgccctgattttgtcttctaccacgacacactcataggctatcttcagatctcgacagtattttatgtagaatgttattttatttcactctcttcaaagtagtcagttgaagctggtatcgctgtcctgaccacaagtgagaaaataagcagagttgtgaagtgctttgcccaaggacccacagatttttaaaagtagaccagatggagaatccagatcaggtttcagccttcatttccagccagcttttcaacatagacatggcaccactttttaaaattttcctgtcagctactgattatattgtgtatttcaaccagagatgccatgttttgaaatatttgtctatcaaacaaaccacatctgttgagttataatttattttccacttttgctaatcaagcatgtatagcttctcatcatcatttttgatgatcatgagctaaaaaacaagttattaaaaataagttaaataaacctaatcaaaataaatgtatcttggtatttacatcagtcattatacaagtaaatgcaaattttctttaggcttttaaacattttgaaaatgacaatggctttgtttccaacatgagtgaaccagtttaactgtggtttacatcagcctgtgtaactatgatcatacatcattacttgatattagccctggaattaaaagacagattacccagcaatcccatttctgggtatatacccaaaggaaaataaatcattctaccaaaaagacacatgaactggtgtgcttatcacagcactatcacaatagcaaagatatggaatcaacccaggtgcccatcaatggtggattggataatgaaaatgtgatacatacatatatatctcatagaatactatgcagccacaaaaaataaacaaaattatgttccttgcagcaacatggatgcagctagaggccattatcctaagtgaattaatgctggaacagaaaactaaataccatacactatcatttatacgtgagagctaagcattgggtacacttcaacataaagaagggaataatagctagacactgtggactactaagtggaggagacaggaatgggttcaagcctaaaaaactacttattgggtactgtgatcactatctgggtgataggatcatttgtacccccaacttcagtgtcacacaatatacccatgcaacacatctgcacgtatacccccgaatgtaaaagttgaaattatgaaaattaaataaaaataaaagacaaatttgcacgatgttttacccagtatgttagctgaaaatatgtaatgttttaggtgaaaaaagtcagaagttatgcaaaagataaattacacagaaattacaggcatacatgaaatatcagctctgtgtatttttttggcagtcccaagtacctgaatgaatatgaacagtttttgttcttattttctggtgaatgattttttacaataatatgacattatgaaggatcttctaacatgaacataacaacagcaaaaatgggcaaatgtctcaaggttgttaatgacaaatacgtggtggtaatcaatcagtgtcagctcccactgtcaccagctggcatagcaggcctcgtcaacacagcactctaagaaactacaatttacctatgaagttggcacaagaaatggtatccatttttttattcttgttataacttttgtatttctgacaatgtttgtgatatcattttacatgaacctcatacacattctactactcattggcacctcttcccacctattaatgttttggccaacataaaattactggttatctattgctgtatcatgaaccactgaaaaacttagtagctttaaacaacagcagcaatatttattttactcatgaatttacaacttgggtagagttggtggcagcagttcatttgtgctttgtgtgccatcagctgaaatggctcagcttagattgaaggaacttcttccaagacggcccactcaatggctggcaagttgatgctgttatcagctgagagctcatctggggccttactttctcctcatgtgggcatttccataggttactgagactttgacagcacagtgcctgatcccaagtatgaattttccatgacacaggaagtgaatgcagccaatcttttaggtccagagccaagaaactggtaacctgtcacattccaatcattccattggttgaagcagccacaaagccagctcagttttaagaggcagagacagacttctcctctcaatgagaagagagccatagaatttgtagccatcttaatttattatgataatgttatttttatctcaagtcaagagataagagacaaggaagtataatcggttatggtgactgcctatctagtcttcaaatatttagccaacatgcatcaaatttcttgccctacaggaagccaagaattatatcttagctgggcgtggtggcacatgcctgtaatcccagctacttgggaggctgatgcatgagaatcacttgaacctgggaggcagaggttgcagtgaactgagactgcaccactgcactccagtctgggtgacagagtgagacactatctcaaagaaaaaaattatactatatcagttctttaatgatttattttttacattcaaatgattcaatgttactcaataagtgaatgtttgcaaaattattccagataggtataaacttctgatcgtaatcttcttgaggactccaacttgatatttaaatctctatatgcagagacaactcatgtttttgtaaacatatataaattcataggaaaagccatgataaataatagtgacagtaattggtaggaaaaaatatatattgtttgtaaagatgttttatacatatggacttttgtggtctgatatgcatacagttaacaaatgcatttattttatatctcttgcattgttatctatttctgtgtcagaagaaagaaggcattttgccccttttgttctttctacctaaaaccagtatataatgagctatttcattttttcctagtcacgatcaaagcataatttcagtttaattttgagttttaaattttatacctttgacagattccttctgaaaagaatttatcgtgctgaagagagttataaaatgcagtgattaaatatatataggtaaatagatattttaagataaatctatcatatatctctatatagagatcatttattacatatatacatatatgtatatatacatatgtgtgtgtatgtatatatgtgtgtgtgtatatatatacatacatatatatatatggagagagagagaaatattttgtttttccctcaggagggaaatgcattttctctcctggagcagaagcatgtacaggttaagaaaaagatattctaagtgggtagaatagatgactgactattcatctgttctagcttccggtcctgcaagaagtttggtgaatgatagctgaatatttgaagactggatagaaagctaccataatcagccatactgcctgtctctttaggatagtcttcaaggaatccagccatttttcctacccactgatgttgccaccttcagcaattatatgtgtgtctatgggttgaggaataatccactaagcgcacatcagttaacaaatgggtgactttagaggaagaagtttcaatagaagaagtaagaagatgtcaaagatgacatcctgcctcttgtggaagatgggtacaaaccgagctatgtaaaaacctaggagagtaatattctggctatcctttaagactatgttcttgaaatatttgttaattagttatttagagaagacagtggatactgcctatagaaactgtgaaaggaccactggttgctcactgcagaggtgtcgagccacctgttgtccttcacttataacacacctgccatttcctggccatttcctaccatacaccaagcaacttttggacaatttcttccaaatacttatactgtttactggaaagggcgtaaaggaaacaatatattctctgtctcctatgtttccaatgacatagtaatgccttagaaatatttcagtgttttaggaaattgtttcttaacccaggttagtatacagaataagggccaaattcctttatatgggaaacaatacccttcgaaatctgtggcttatatttccaaattaatcttttgctcctcttcatctggcactctttgcttcagcatttttaaaactctgtgtgttttttgttgttgttttgtttttcttgtttttgttttgttttggttttctcttgttttaactagttgttttcttatgcttcaatcttttgtacatgaattcctaagcttgaaatgctgctgcccctgtggttcgccatgaaaaataattcaatttaaagtgataactttaaacaatttccttgacctgtgtatctcttttgttgggtgcttttgccttttggtctgcatttttttattaacttgtacatacctctgtaagaacagatagtgtaaaatgttctttaatatttaatttacttttctaattctttgaagaaaactggtgtttcatgtaggttaactttacattcccatcagctaccatacaatcgatatccaataaatatgaatgaacagtgtttgctgatggccgaccttgactgaagaatatttaataattgagtggttgagaattctgaaaaactttttgaaaacactatggaaattgtcagcctcaatgctggccttcataagcaagtactctttgcttaggttactacattctcccaaccatttgaaactgctgtaagataattatttagcatttatattatgcatgggatcccatctacagggacagtttttccttcttgtactgcagtatttcttatgctataatgaaagaaaaaattattctaaacctgtacgtttagcttaagattaatgtgtctttatcttatctaggtgttttaatccccttccagccttctttccctcccttcctacatccttcccttccttccttccttttccttccttccttttttctttccttccttattcttacttccttccccttccttctttccttccttccttccttccctcccgccctccttccttcctccgtccttccctccctcccttcctttctctctctttctctctttcttttttcctatttccttgcattgcaaagccttccaaataaaactaaatttaatcatgaaattcacacaggatatacagttacaaataatggattaggatgtaattagctatatgtgtgtgagtacaataaaatctcataatcaaattatgtgtatctgtagttgtaaaaacataacattgaaacaccatataaattaatttagagccatttttgatatttttgttagtatgtaataattgttcatatttatggggtacatctatgggatataatcacgtggaaatacataaaagtattgctagcttactgatggctcttagacaattacatggcaccatggacacataacttctccgaaaaaggagtttctcttttgaaatgtgagatgcaatgggagaccctcaaatggtcatatctccaaagttaactcattatgtcattgtctcaaagtacctgaataaagctattttgagcttcagtccccgacggcataaattctcattttcacatgagtggttgcaactattcatatgtactaagatttactaaagtatctttctgtggaggattattataaaatattgcattttctcaactactggcaatctaagtacaccatacttaagaagtcaagtaagagttttggataatcgttttccttcctccagaaactttatttttcttttaaatttaaggtgatttattgggatatactattatctaaaatgtcaaatgcagacaaatttaaatctgagaaacaaaataagcttcagagtggtgggataggatgcagaatcacatgaatccagaatgattgatttaaatacccagcataacctcatcttagttttgctataaatacaacaattaaaacaggctcatttattatcacccccaacccattccaaacttgcatacacccttttaggcaatgcctgattcctggtcttgcaggaaagacttcctcttcaactcttttacttgggtgatgcctactaatccttattatctccactaggcagtctccctaattccccaaccacgtgtacatttttttttctgttccccgtagtatcttgtgaatatctacctctacatttaacagtttgcattataataactattttttaaatatttctcagtcactatactctgaactgttgagagctatactgtatgtctttataaatagaatcaatacaattttgttggctgatcaacaaaccaggcaatatcaaatattatgttggtgcaaaagcaattgcaaatttgccattatttttaatggcaaaacccacaattacttttgcaccgacctaatagaatagaaactaagcccaagcaaagtacaataagaaaatataagcttttgcttaaataattctgataattagtttattttcttctgttacaatataattttactttagtaagtaattttactttaataaaattataactagtaaaattataatgtttaggcaaatataaaatatttttaatgatgatttatttaacttattaattaatgagggaaattttaagataaccaaactgggctaaattgcaattaaggatttagataaagagtatttaatatataatgtaagggcaatattttgaaatttcatacaaaactgaatgatgtctgacagagaaaccgtatttctctgcatattgccctggacagaaattagtttcatattgaacacaagtaacctcattttatgagggcatctctcactagacaaaagtcaaaacgtcactcttactctctgccccacagaggtgtaacataatctagaaattggaaaatcaagcccatcattacactgagatactactcagtgtctattttacctgttttcaacttttacgtaacttgtctgacatttaagttgaggttctcgaattcaaatgccaacacatatcagaaggcagttgaagtgcaacaataaggtaggccatgtttgaacttggaggccagcatattctggtgctttaggaaaatcctgatatcagaattctagtgtaaagacttgtgattttaagatttggtcagtaatttaaaatattttaagactctaggccaaacaaagctctttatggttcgtggaggccaaaagccaccagctcgagacctacgttgtagaatccaacaggcaatccagcttccctacagaaactggattttatacactgatttcttgctcagtacgcagattttttttttttcttggcctttaggaaacacttctgctgtggaaaccttttgagagctaaacttttcccttacaaatttgtctctgccctttcttagtacacatcagtgatgatatttttctctagagcagtatcttaaaaagtcaatagcctaccacccactctgcagaatcaattgaccatagttaaatttttaagttagcctcattttttcaagactatcagagatatatttgtctaagtttaatgtgtttttttaaaaataattttgtgtttccttaggaattagataagaaaaattgttggagcatgcctcatttatccccctagaattttaattaaggaatgtttatatatatttttaatatctaaaaacaattcagtgaatgccgtttacaaatggtttgtgatatatacatttcactagcattccagaaatgtgttaaagcttctcttaatgattcctaaaataatcatagaataatatacatggacatcatagtatattattttgatcttttgaaaagataatggaaaaattgatatgcaaagttaactacaaacagtatataacttattgtcaattctgcaattatcttctggattttaatatataaatacacaataatttctgaagttttagaaatttacaaattaaaaaatagagatcacctgctgtgacagaattggccaggaaggtaaaattttaaaaatagttttattgttttcaattggtttcttagtgagcacaaaaatatggagcaaagacatcactcaggaaggatctaagctatatatgtattgattaggattctcaaaatacagaattttctgaacatttgctttccctagttaaatgagagtttcaaccactttattttaaattagttgtgcaactggtatttaaaaaaacaataataataataaaaaaaaaaactcttcttactgcctaaggaaatggcatctattgtgtgtgtgtgtgtatgaataatctaattgagtgtataaactaccacattataaccgcaagctgtattgaaaaataaatatcagctataagactatgttaacttttgtctttgtggtacctaatctccaaagatggcctcagtgacagagtcctcacagtcttcatgtttttgtgtggtttcttccgatactcaatttgtgacttgtttaaccgattgagtacatgcaatgaaaaaaaagacactttgactcttgcaggtgtagaccttaaaaggggccagccctctctactttttaacataatgtctgatctgccactttttttctcattaaaaaaaaaattgctatctctaccttcttcctcccattgcaaacgccactgaaagtgatttttgtcaaatttacctgtcatctccttgttttaaattcaatgaaaccatttaagtgcataaattattcaacctttgtgtggcactggaaactttcttttattcccagtttcttaaaatagcctctttagtttcttccagtttttgtctttgtccagttgttctcaccctgtttgtggattaccctcttccagagaatgttggtattctcatagatccactatctgctttctcttcttattccacacattctcaagtaattttatctaggcccatggctttaatctcatgttgctgacttcccaaattccatctccattacaatcccatttgcttagttccagaatttcttacccagttgccaacaagacaagtttattggacttttcttcggggtcctgaaaccagcatactcaaatcgcattcattcctgtcctcagcacattccaggtgagagccccgaaacctcttcttattctagaaatagaacatctagttgaataagccagaagccaagattcattcctggctcttctctctttcactttccctgcatgcattgaacctgtattttgtgccctttgttttaaatttcactttaacaattcagtttatttctacctaacaacttgtaataaaacaggttggtgtcatggcagagaatgcagaatagtcagtagttgagttctgctcaaaccaattccagatagataggctcacggaagaagaaccaggaaatccaagggataggacaggtcctcaaatttttctctgcctcagaattgtctcagtaatatgcattcaccaacatctggaggacccaaagttagctaaggagcagataatctcaaggaatctttgtcagaaccatcctccaaaacaagtgcttagcaaactgctctatgtgacagtgcattatgataagagcaagtggccctgtttatgggagcttttggatattaaccagtatctcatcccttaaagatagatgtccctataagtgattgttgaaggtggaaagttagaagtaagcaatagtttgagactattttaagtttaccctcaacgagctggaaatcagttatattttatttggtatttactcatttttcaccattatgtaattcaagctataatttcagtactacttgttgttaactacttgctatagacaagtagataagtaaaggcctaaacagtatctcaaaactaaaagaggagatttcctaagtatactgtcaggagcttcctggccatcgggatattttttagtgttgtcctgtagcatagtcaatcaccaaattctgtcagttctgtcatcacaacatctctagagtaaatgtaatacattattcatttttctgttttagtttaagccttattacgatccaactcaaattactcgaataattttctaaatagccttcctgcttctagtcctgaccatctgcaagtcaattcatttgaaagtttttcaagagggaaagcagtttacttaaccatgtctccactccacagcttcaccccatccccaactgttctaaaccttgctctgctctctaagataaaatctaaatgtatttgaatggctgatagggccttatccagtcaagccctggcctatcttgctagtcccatctcctgccactatttctattcccacttcatcatccactcctctcccactcccagtcccatacctcctgattcattctgcttaattcctgtgtttctccccagactccaatgaggcagtacctctgtcagctttctctgaacctcattaggagtctacagagttacctattcatattgctatccgagcgcagaatacttactgaatttcattacactcctatgctcacttggctctctcttctacctgcaccgagtctcttgggaatccagaccatcttattcattcactgcttagcataattcctgtccctagtggacacgtaataaatatcagttaaatattcaatgaacaaatgaatcctctgtcctcataatatactgctttattttatattctaagactatgcttcagaaaatatagaaatcaacaatgctattctgattaaagtagtaataataataataataataataataatgtttctttatctctggacctaagatgtcaacacaggtaaaacaaaagctattttttaagatattaaacttaggctaaaaaacagaaaaatccacttaatgcaaacagcagctacttatcaaaatataaataaaggaatattatggagaaaataattctctagtgtgcttaattcacccgagcctcaacagtttctgctgagtaaaagctataatgcccaatgaagttttacatttccatagaaaacaaaaattatttccagatgtttgctaagaataaaatatctgtatgtatgcataattggtatcaaaaagctagcaaaagcaattaaaatagctttctgtataatttctcagatattatgaatacatggatgaatacacagggaaagaattaaagagcattacactttgtcaatgttctaaataatggaacatgcaatatatgtcctagaaaatggaatttgacttaaacggcaaaataaaagccaaagaggatgaaataaacagaatcactttctaaaatttcatctctgttctagattccttatggaatttgcagtaggaaaaacttaaatatgcaatgagtatattaaaatccaaaggaaatatcagtacttacttggattggatatcaaaaactaaaagacaaagtcagttgtattagatggctggggaaatatcaggactctgaaaaaaattatttttgctaacaattgtattgtttattcttctacttttactaatgtgaactttgaaggagtatatttgttgctctttgagccctttacagtttttcttgcatatatgctcctttttttttttttttttttttttgagacggtctctggctctgtcacccaggctggagtgcagtggtgcgatctcggctcactgcaagctccgcctcccgggttcacgccattctcctgcctcagcctcccgcatagttgggactacaggcgcctgccacctcgcccggctaatttttctttttttttgtatttgtagtggagacggggtttcaccgtgttagccaggatggtgtcgatctcctaaactcgtgatccacccgtctcggcctcccaaagtgctgggattacaggcgtgagccaccgtgctcagccatatgctccattttttactttatcttcctcaggagcagtggctggcagtgagtgtaggggagattgtggctttcatcatatgctctcctgaactactcataatttctcacttttaatccctcttctgaatctaaagaatgcagtgcttttgaaatatactttgtttcttcatccatatttcaaagaagctatattacagtaacgtacatttcttctagtacttaaataactggaacttatatgacacttgggacaaaactggttcatactgaattttgctataataagaaaagagttatggcaagtttccaccacattgtaatcttatatgtagaaactgtataaagggtatgcaaaaacagtatgcagatgaaaattttcacaattcatatgcaggacaaccacctgtggctttcatcactttctcttcatttaagctaacttcccttgcaaacttccatttccactaatgccagagacagtttaaacgagccagtgaacgttaacctagtctcttctggttaactggagccctttcttgtaaatgttccgtctcatgagctgctcctcactttcttatccccaccaataaagtagctgagagcatgtggctgccattgcagcctcagggcagtgaggatgaaatctctgtttcccgagatgggccctcgatgacatggtttttccgacgtgtggtaaggtcatgaaacacatgcccagcaaatcacatgatgtcattgtctcctctctaaccacactgactcagtgactggtcagaactactcgagtagagcatgcagactgcctctggactaccagctgattttactggtcctcaaatgacatatctaccgatattgggagcaagagttggaacacatttttatcaacttcacgttggggcaacattcaagactgtgatctatgggcttgtaccattaaacagggtattgttcagttcaggtaatgccagactcacttctgtggattacacactggccatgcacagtgcgatcaaatatcggaccttgaggggttggataaaatcctgttttgtcaccagagatagcttgagaatcattttcttatgagatatacccattttcacagctgtaaacaccattactatgctgaaaactctctaatttataactctaccccagatctgtcttctgagctcccaactcagcaaattgcatactcaataatttcatttgcatgtaataagctccccaaacttaatatgttaaaaaccaaatttctgacccccactccaacaaaataaaacaaaatgaaactaaaacctgatccttctcagtctttccatcttagaaatgacaactttgttcttttattcatacaaaattagtgaattcatcaagaagatttttatcttttattaccaccctggtccagatctgacctctctctatcctcctgttgcaatctcctttagaaccttaggcaaaggaatcagcggatctcacagacctagagaggagaaaggtggtcaccagaggcctgcagagagagaggaaaggatgggcaaagagaagatattaatcaaaggttacaaagattcagctagactgggggaataggtttggctgatctcttgccccgcatagtgactgccattagtaataatgtatatctccaaattgttaaaagaatagattgttaacattttcaccccattaaaaaagataaattggtgaggtcatagaatatgttaatttgagtttttctctactatatatgtaaatcaaaacatcacattgtacaccgtaaatatacataattattatatgtcaatttaaaataaagttaaatttcttttaaaagtataaattagataacgttaattcaacactcacaacccttcattgctttccatgttacttattaaatagctcaggttctcaaaatagcccacaatatcttaatgatttcaccaataagcaagcttttcagccaccctgcctctaacttactcgtctccattcacactggcctcctggttgttactctagcatagcaagcacacctctgctcaggaaccttatatttgctgttgcttctccttggacctctatacacgtcaccttttcagatagaacatccctgaagaccctctatagaattgtggccccatacctgtactcggtccctgtaatctcgccacgaaatgtggcaggtttacataatactgtacccttagtgtctagaacaatgtcaggtatttattgagaagacattcaaactttgttgaatgagagaattcatctttgtttgtttgtttgtttgagacagagtcttgctctgtcacccaggctggagcacagtggcgcgatctcggctcactgcaagctgcgcctcccaggttcacgccattctcctgcctcagcctcctgagtagctgggactacaggcacccgccaccacgcctggctaattttttgtatttttagtagagacggggtttcactgtattagccaggatggtctcgatctcctgacctcgtgatccgcccacctcggcctcccaaagtgctgggattacaggcgtgagccaccgcgtccggccgagaattcatcttttgagcatggggctcagctcttgtcactgactgtgaatcgtattgtgctgctcacaaagttcaatggttttcttaatgtggaataattttatgtatgagcagatagaagggaaccaagagtaacatctcaagctcacctaccttgaaaagtccctttgtccttacaccttaccaccgcatactggatgtggcaatgaagtagaacaccagcctagtgttcctcaacctcagcactatgacatttggggacagataattccgtgtagtgggagattgtcctctgcattgttgcttagccgaatccttcccataggcctaacaggtgccagatactagtaacaatgcctacctccgcccctactcacgttgtgacaatcaaaaatgtctcctgaacttatcaaaagttccctggagtcgggagggggaaattgcctctggcctagaagatcttggatgcctccttagcctttgagggatgtgaggatttcatcaggagttttataatttggccttcacctaccacacctttctgcctgagactcagagaactgggaatctgtcctcttaggggctccggttttatccacattctcatcacctcacctttaatttccttgatacagaattctttctacattctcttcctatttggaaggacttcccctttcatcctcttacgagttggttccagcagaagtttggagtaaaattctttgatcagagttgcctgagtctggctcttgatttataaagaaagtgtatagaatttagaaaatattttgatcttccacagagactagctttccccaagtctttttcattcagagactcaaagaagtctaatgtgacagtcaaacaacttttctttgtagctgtcatttgccctccttctaaagcatgggacctcagtgggcaatgagtgataagccagtgggtgttactgtattagcagaatgaaacctataacaatttttaacttaatacaataaaatttggtttacgaaggaggagccaagatggccgaataggaacagctccgggtctacagctcccagcgtgagcgatgcagaagatgggtgatttctggaaatcatctgaggtaccgggttcatctcactagggagtgccagacagtgggcgcaggccagtgggtgcacgcaccacaccgtgcgcgagccgaagcagggcgaggcattgcctcacctgggaagcgcaaggggtcagggagttccctttccgagtcaaagaaaggggtgacggacgcacctggaaaatcgggtcactcccacccgaatattgagctttcagaccggcttaaaaaacggcgcaccacgggactatatcccacacctggctcggagggtcctacgcccacggagtctcgctgattgctagcacagcagtctgagatcaaactgcaaggcggcagcgaggctgggggaggggcgcccgccattgcccaggcttgcttaggtaaacaaagcagccaggaagctggaactgggtggagcccaccacagctcaaggaggcctggctgcctctgtaggctccacctctgggggcagggcacagacaaacaaaaagacagcagtaacctctgcagacttaaatgtccctgtctgacagctttgaagagagcagtggttctcccagcacgcagctggagatctgaaaacgggcagactgcctcctcaagtgggtccctgacccctgacccccgagcagcctaactgggaggcaccccccagcaggggcacactgacacctcacacagcagggtattccaacagacctgcagctgagggtcctgtctgttagaaggaaaactaacaaatagaaaggacatccacaccgaaaacccatctgtacatcaccatcatcaaagaccaaaagtagataaaaccacaaagatggggagaaaacagaacagaaaaactggaaactctaaaacgcagaacacctctcctcctccaaaggaacgcagctcctcaccagcaacggaacaaagctggatggagaatgactttgacgagctgagagaagaaggcttcagacgatcaaattactctgagctacgggaggacattcaaaccaaaggcaaagaagttgaaaactttgaaaaaaatttagaagaatgtataactagaataaccaatacagagaagtgcttaaaggagctgatggagctgaaaaccaaggctcgagaactacgtgaagaatgcagaagcctcaggagccgatgcgatcaaccggaagaaagggtatcagcgatggaagatgaaatgaatgaaatgaagcgagaagggaagtttagagaaaaaagaataaaaagaaatgagcaaagcctccaagaaatatgggactgtgaaaagaccaaatctacgtctgattggtgtacctgaaaatgatgtggagaatggaaccaagttggaaaacactctgcaggatattatccaggagaacttccccaatctagcaaggcaggccaacgttcagattcaggaaatacagagaacgccacaaagatactcctcgagaagagcaactccaagacacataattgtcagattcaccgaagttgaaatgaaggaaaaaatgttaagggcagccagagagaaaggtcaggttaccctcaaagggaagcccatcagactaacagcggatctctcggcagaaaccctacaagccagaagagagtgggggccaatattcaacattcttaaagaaaagaattttcaacccagaatttcatatccagccaaactaagcttcataagtgaaggagaaataaaatactttacagacaagcaaatgctgagagattttgtcaccaccaagcctgccctaaaagagctcctgaaggaagcgctaaacatggaaaggaacaaccggtaccagctgctgcaaaatcatgccaaaatgtaaagaccatcgagactaggaagaaactgcatcaactaatgagcaaaatcaccagctaacatcataatgacaggatcaaattcacacataacaatattaactttaaatgtaaatggactaaatgctctaattaaaagacacagactggcaagttggataaagagtcaagacccatcagtgtgctgtcttcaggaaacccatctcacatgcagagacacacataggctcaaaataaaaggatggaggaagatctaccaagcaaatagaaaactaaaaaaggcaggggttgcaatcctagtctctgataaaacagactttaaaccaacaaagatcaaaagagacaaagaaggccattacataatggtaaagggattaattcaacaagaagagctaactatcctaaatatatatgcacccaatacaggagcacccagattcataaagcaagtcctgagtgacctacaaagagacttagactcccaaacattaataatgggagactttaacaccgcactgtcaacattagacagatcaacgagacagaaagtcaacaaggatacccaggaattgaactcagctctgcaccaagcggacctaatagacatctacagaactctccaccccaaatcaacagaatatacattcttttcagcaccacaccacacctattccaaaattgaccacatacttggaagtaaagctctcctcagcaaatgtaaaagaacagaaattataacaaactatctctcagaccacagtgcaatcaaactagaactcaggattaagaatctcactcaaaaccactcaactacatggaaactgaacaacctgctcctgaatgactactgggtacataacgaaatgaaggcagaaataaagatgttctttgaaaccaatgagaacaaagacacaacataccagaatctctgggacgcattcaaagcagtgtgtagagggaaatttatagcactaaatgcccacaagagaaagcaggaaagatccaaaattgacaccctaacatcacagttaaaagaactagaaaagcaagagcaaacacattcaaaagctagcagaaggcaagaaataactaaaatcagagcagaactgaaggaaatagagacacaaaaaacccttcaaaaaaatcaatgaatccaggaactggttttttgaaaggatcaacaaaattgatagaccactagcaagactaataaagaaaaaaagagagaagaatcaaatagacacaataaaaaatgataaaggggatatcaccactgatcccacagaaatacaaactaccatcagagaatactacaaacacctctacgcaaataaactagaaaatctagaagaaatggacacattcctcgacacatacactctcccaagactaaaccaggaagaagttgaatctctgaatagatcaataacaggagctgaaattgtggcaataatcaatagtttaccaaccaaaaagagtctaggaccagatggattcacagccgaattctaccagaggtacaaggaggaactggtaccattccttctgaaactattccaatcaatagaaaaagagggaatcctccctaactcattttatgaggccagcatcattctgataccaaagccgggcagagacacaaccaaaaaacagaattttagaccaatatccttgatgaacattgatgcaaaaatcctcaataaaatactggcaaaacgaatccagcagcacatcaaaaagcttatccaccatgatcaagtgggcttcatccctgggatgcaaggctggttcaatatatgcaaatcaataaatgtaatccagcatataaacagagccaaagacaaaaaccacatgattatctcaatagatgcagaaaaagcctttgacaaaattcaacaacccttcatgctaaaaactctcaataaattaggtattgatgggacgtatttcaaaataataagagctatctatgacaaacccacagccaatatcatactgaatgggcaaaaactggaagcattccctttgaaaactggcacaagacagggatgccctctctcaccgctcctattcaacatagtgttggaagttctggccagggcaatcaggcaggagaaggaaataaagggtattcaattaggaaaagaggaagtcaaattgtccctgtttgcagacgacatgattgtttatctagaaaaccccatcgtctcagcccaaaatctccttaagctgataagcaacttcagcaaagtctcaggatacaaaatcaatgtacaaaaatcacaagcattcttatacaccaacaacagacaaacagagagccaaatcatgagtgaactcccattcacaattgcttcaaagagaataaaatacctaggaatccaactcacaagggatgtgaaggacctcttcaaggagaactacaaaccactgctcaaggaaataaaagaggatacaaagaaatggaagaacattccatgctcatgggtaggaagaatcaatatcatgaaaatggccatactgcccaaggtaatttacagattcaatgccatccccatcaagctaccaatgactttcttcacagaattggaaaaagctactttaaagttcatatggtaccaaaaaagagcccgcatcgccaagtcaatcctaagccaaaagaacaaagctggaggcatcacactacctgacttcaaagtatactacaaggctacagtaaccaaaacagcatggtactggtaccaaaacagagatatagatcaatggaacagaacagagccctcagaaataacgccacatacctacaactatctgatctttgacaaacctgagaaaaacaagcattggggaaaggattccctatttaataaatggtgctgggaaaactggctagccatatgtagaaagctgaaactggatcccttccttacaccttatacaaaaatcaattcaagatggatcaaagatttaaacgttagacctaaaaccataaaaaccctagaagaaaacctaggcattaccattcaggacataggcatgggcaaggacttcatgtctaaaacaccaaaagcaatggcaacaaaagccaaaattgacaaatgggatctaattaaactaaagagcttctgcacagcaaaagaaactaccatcagagtgaacaggcaacctacaaaatgggagaaaattttcgcaacctactcatctgacaaagagctaatatccagaatctgcaatgaactcaaacaaatttacaagaaaaaaacaaacaaccccatcaaaaagtgggcgaaggacatgaacagacacttctcaagagaagacatttatgcagccaaaaaacacatgaaaaaatgctcatcatcactggccatcagagaaatgcaaatcaaaaccactatgagatatcatctcacaccagttagaatggcaatcattaaaaagtcaggatacaacaggtgctggacatgatgtggagaaataggaacacttttacactgttggtgggactgtaaactagttcaacccttgtggaagtcagtgtggtgattcctcagggatctagaactagaaataccatttgacccagccatcctattactgggtatatacccaaaggactataaatcatgctgctataaagacacatgcacacgtatgtttatcgcggcattattcacaacagcaaagacttggaaccaacccaaatgtccaacaatgatagactggattaagaaaatgtggcacatatacaccatggaatactatgcagccataaaagttgatgagttcatatcctttgtagggacatggatgaaattggaaatcatcattctcagtaaactattgcaagaacaaaaaaccaaacaccgtatattctcactcataggtgggaattgaacaatgagatcacatggacacatgaaggggagtaccacactctggggactgtggtggggtggggggaggggggagggatagcatttggaggtatacctaaggctagatgacaagttagtgggtgcagcgcaccagcatggcacatgtatacatatgtaactaacctgcacaatgtgcacatgtaccctaaaacttaaagtataataataaaaaaaataaataataaaatttggtttacaatcttcaagaacattataaccattatatataatacatggtaattttcaagtatctcaaacacacatagaatttcatagagaggtataaatatttatgccaaaacacatggtataatgatttctttcctttgattaagaggcatttttatagtgatcattattaaatgaaataaatatttgcatgtggtacagtatacaatcctttcattacgaaatgttattttaaaagtatgtattgggtcctgaatcacgatgttttaaaatgtttgattttaatgagtcattgaatatgtattagcttttatgagatgcacatatttggaatatggctgtattcgtcagcataaggatgatttaaattttcttaaaatagactattaggatgcagatgttcttgctgacaggtgcttctaaagcattaaaaatacatgtaaccacagtgcttttgacaatgtaattctgttgccttcacacctattaagttgagcaatttcccttatttttctcaaacatgcatactaataaagtcatctatcagtgtttacatatatctaataattggaaaattacattttttatccataataagaaaaaagataaatacaattttgtgggaaatgctatgttagctctcaaataatgtaagtttagcagggcctcagggtaacaatgttttaaattaatcttttggtactatacatcaatttatattgaaatcatcaatttatattcaaatacctgtagtgctaagaccatgttttatttgtaatatcccctttaaacctcaagaaagagtccttattctaatctcataatttagtgataaaatgtatattcactttcccatttgtggcataattttcttagatgtcaaacattatttttctagactgtgaaaaacaaaggctttagtactatttatttgactgcgggaatgaaaataacattgttgagtatctgccctaagccaattactgtgctaatgacttttcttttagaatattgttgcctctttattctcttaatcattttaacattctttattttgacccactgcagtaacatttgatatactcatatgttatacgacaagtaaacatttcatttgctcccttcctttgttgatttcataatttcatgttatatgtagatgatgtcttcaggaaaattaatgactcctttattggttaatggagtttatcacttttcataagacaagtttaagtaatgtctatagattctgggttagataaatcagcaaagtttcatagagaaagagggcctgaacctcgaaagttaattatgctttagaaggcaaaaatgagcagcgggtcttttcagaagcgcatagggaatatgtaggattccctaggtactagtagttggccaggttagctgacgtgcatggtatctgtaagagagctgcgaatatggaaagaggatgaggctgcaacattggtgccttcttcattcagagaaggcactggaatgccaagctaaggggtttgtgattttcctgtaggtcctagaaggtgaaaaagtttgatgaaaatttttacacagagaagagaaagtgagtttgttatttcaggctgctataacaaatgatattagactgagtggtttataaatgagagtaatttatttctcacagttcttcaggctgagaagtctaaaaccagggtgccagcatggttgagtttttggtggtggccctctttcggcaaggagactgccaacttcttgttatatcctcacatggcacagagctcaaagaagcaagctttcttgggattctaaggtcttaatcccatgtgtgaaggctctacccccatgacttcatctaaaccctattacctcccaaagcccctctcctaatggcgtcacatagataagtggggtatcaacatatggattcttttttttttcaataggtttttggggaacaggtggtgtttggtgacatgaacaagttctttagtggtgatttctgagattttggagcacccatcacctgagcagtgtacaccgtacccaatgtgtagttttttattcctcaccaccctcctaccctttcccctgagtccccaaagtcccttgtaacattcttatgcctttgcatcctcacagcttagctcccacttatgagtgagaacatacgatatttgattttccattcctgagttacttcacttagaataatggtctccagtttcatccaggttgctatgaatgccaatatttcattatttatggctttttaaaagtaatgtttttttaaaacattatttatgctttatggctcagtcgtattcatatatatatgaatacacaccacattttctttatccactctttgactggtgggcatttgggctggttccatttttaattgtgaatggtgatgctataaacatatgtgcaagtatcttttttgtatagtgattttttttccctctgggtaggtacccagggcacgattactggatcaaattgtggatccacttttagttctttaaggaatctccacactgtttttcacagtagttgtcctagttttccttcccaccagctgtgtaaaagtgttcccttttcaacacatccacgccaacatctattatttttttttaatttttttattatggccattcttgcaggactaagagggtatcacattgtggttttgatttacatttccctggtcattagtgatgttgagtattttttcatgtgtttgttagccatttgtatatcttcctttgagaattgtatattcatgtccttagctcactttttggtgggattgtttttttgtctagttgatttgtttcagttccttgtagattctggatattagttctttgtctgatttatagattataaagattttctcccactctgtgggttgtctcttcactctgctgattatttcttttgctgtgcagaaagaagctctttagtttaattaggttccatcaatttatctttgtttttttgtttttttgttttttttgcattttcttttgggttcttggtcatgaagtctttgcctacaccaaggtctagaagggttttcccaatgttatcttctagaatttttatagtttcaagacttatatttaggtttttgatccatcttgagttaatttttgtataaggtgagagatgaggatccagttttcttcttccacatgtggcttgtcagttatcccagcaccatttgttaaatagggtatactttccccactttatatttttgtttcctttttcaaagatcagttgactataagtatttggctctatttatgggttctctattctgtggtctacatgactgtttttataccagtaccatgctgttttggtgactatggccttatagtataggttgaagtagggtaatgtaatgcctctagatttgttattttcacttagtcttgctttggctgtgcagattcttttctgatgccatataaattttagaactttttcttctagttttctgaggaataatggtggtattttgatggaaattgcattgaatttgtaacttgcttttggcagtatggtcattttcacaatattgattctacccatgcatgagcatgaaatgtgtttccatttgtttgtgtcatctatgatttctttcagcagtgttttgtaattttccttgtagaagtctttcacctccttgattaagtatattctaagtttttttgttcgtttgtttgtttgtttttgcagctatcgtaaaaggagttgagttcttgatttgattctcagtttcatcactgtgtatgtatagagctactgatttttgtacattaattttgtatcctgaaactttgctgaattcatctaccagttctaggagctttatgtatgagtctttagggttttctaggtatagaattatatcatcagcaaaaacagtttgacttcctctctactgatttagatacactttatttctttctctcgtctgcttgctctggctaggacttccagtactatgttgaatagaagtggtgaaagtgggcatccttgccttgttccagttctcagggcaagtattttcagcttttatccattcagtataatgttgactgtgggtttgttatatatggcttttattaccttaaggtatgtccttctatgccgattttgctgaggattttaatcataaaaggatgctggattttgtcaaatgttttttctgcatctattgagatgatcatgtgattttcattttaaattctgtttatgtggtatatcacatttattgacttgttgatgttaaaccatccctgcatccttgttatgagacccacttgatcatgatggattatctttttgatatgctgttggacttggttagctagtattttatcgagaattttttgcatctgtgttcattaaagatattggtctatagttttccattttgttatgtcctttcttggttttggtattagagtgatactggattcaaagaatgatttagagaggattccctctttctctttctctttctctaaaaatattgtcaataagattggtaccaattattctttaaatgtctgattgaattcaactgttaatctatctggtcctggacttttgttgttgttgatgataactttttaattaccatttcaatcttgctacttgttattggtctgttcagagtttctatttcttactagtttaatctaggagggttgtatatttccaggaatttatccatctcctctaggttttctagtttatgcatgtaaagattttcagggtagccttgaatgatcttttgtatttctgtggtagcagttgttttatttctaactgagcttatttggatcttttctcttctttttttggttaatctcactaatagtctagaaattttatttatcttttcaaagaaccagctttttgtatcatttatcttttgtattttttgtttgttttgatttcatttagttctgctctgatctggattatttcttttcttctgctgagtttgggtttggtttgttcttgtttctctagcctccttgaggtgtgaccttagacagtctatttgtgtctttcagactttctgatgtaggcatataatgctatgaatttccctcttgtcactgcctttgctgtatctcagaggttttgatacgttgtgtcactattatcattcagttcaaagaaatttttaatttccttctggatttcattgttgacccaatgatcattgaggatcaggttatttaatttccaggtacttgcatggttttgagagtttcttttggagttgatttcaaattttattccactgtggtctgagagagtacttgatataattttgattttcttaaatttgatttgtgtcttatcatatgatctatcttggagaatgttccatgagctgataaatagaatgtatattctgcagttgttggttagaatgttctgtaaatatctgttaagtccatttgttccagggtatagtttaagtccgttgtttgttgactttctgtcttgataacctgtccagtgctgtcagtggagtattgaggtcccccagtattattgtgttgctgtcaatctcatttcttaggtccagtaagtaattgttgtataaatatgggagctccagtgttaggtgcatgtatacttaggattatgatattttcctgttgcactagtgcttttatcatgatataatgtccttctttgtcttttgatatggtttggctgtgcccccacccacatctcatcttgaattgtagctcgcacaattcccacatgttgtgggagggacccagttggaggtaattgaatcatggggtgggtctttcctgtgctatacccatgatgttgattaagtctcacaagatctgacggttttataaaagggagttttcctgtacaatttctctctttgcctgctgccatccatgtaagacatgactttgcacctccttgctttccaccatgattgtgaggcctctccagccatgtgtaactgttagtcaattaaatctcttttctttccacgttacccagtcttgggtatgtctctatcagcagtgtaaaaatgaactaatacgtcttttttaactgctgttgctttaaagtttgttttctctgatagaataatagataacccagtgctcttttggtgttcatttgcatgaaatacctttttccacccctttaccttaagtttatgcaagtccacatgtgtcaggtgagtctcttgaagacagcagctacttggttggtgaattattcattatgccattctgtatctttaaagtggagcatttaggccatttacattcaatattagtattgagaggtgaggtattgttttattcatcatgttatttgtttcctgaataccttggtttattttcattatgttgttgttttataggtcctgtgagatttatgctctaaggagattctattttggtgtgtttcgaggatttttttcaagatttagagctccttttagcagttcttatagtgctggcttggtagtagtgaattctttcaaaatttgtttgtctgaaaaagattatctttctttcatttatgaagcttagtttcactagatacacaattcttgcctgacaatgtttggtttaacgaggctaaagataggactccagtcccttctagcttgtagagtttctgctgagagatctgctgttaatctgataggttttcctttataggttacctcatgcttttgcctcacaacttataagattatttcctttatcttgaatttagataacctgatgacaatgtgcctaggcagtgatccttttgcaatgaatttcgcaggtgttttttgagcttcttgtatttggatgtctagatccccagcaaggtcagggaagttttcctcagttattccctcaaatatgttttccaaacttttagatttctcttcttcctcagaaacaccaattattcttaggtttggtcatttaccataattgcaaacttattggaggtttgctccttttttaaaaattcatttttctatttctttgtcagattgggttaattcaaaagccttgtctttgacctctgaggttctttcttctacttgtttgattccattgctgagacttgccagtgcattttgcagctctctaagtgtgtccttcatttccagaagctgtgattatattttattttttgctacatacttcactggagagttttccattaatatcctgtatcatttttttgacttctttatgttggatttcacctttctttggtgtcttcttgtttagcttaatagttgaccttctgaatggtttttctggcaattcagagattttgtcttggtttggattcattgctggtgagtaatgtgatcgtttgagggtgttaaagaaacttgtttttgccatattaccagaattgttttctggttcattctcatttgggtagactatgtcagagggaagatctgggactcaagggctgctgttcagattattttgtcccatgggggtcctcccttgatgtggtgctctcctcttccccttagggatggggcttcctgagagccaaactgcagtggttgttatttgtcttctggatctagccaaccagtagagctactgggctccaggctggtactggagagtatctgcaaacagtcctgtgatgtgatccatcttcgggtctttcagccatggataccagcagctgctccagtggaggtagcaggggagtgaagtggactctgttagggtccttggttgtatttttgttacatgctctggttttgcttttgctcgcctccagccaggaggtggcacgttcaagagcacatcagctaaggcagtataaggaggatcaggcagtgggcggggcatacagctcccaagagattacatcctttgtcttcagagttccttgactgtcccatggagcctgtagcagcagtctacctctttcaaagggtctgtggattcttttggctttcctggtatgttcctgcagtagttcttggagcacaagtttacaatgtgggtctccacatgctgctctgtccatctaagtgggagctgcaagttggtccttcctcctatctgccaattttcctccattctcaacatatggattctgaggagatgacaaacatttaatacataataataagatttaataaaatcatgattttataagcagatagaaaagcctgacaaggggaaatattactaagagagtacatctcaaatgttaccataaaaatgtgaaatactggccaggcgtggtggcttatgcctgtaagcccagcactttgggaggccgaggagagcagatcacctgaggtcaggcgttcaagaccagcctgggcaaggtggtgaaactccatctctactaaaaatacaaaaattagtcgatcatggtggcaggtgcctgtaatctcagctattcaggaggttgaggcaggagaatcacttgaaactgggatgcggaggttgcagtgagctgagattccacgccattgcactccagcctggaagccaaaaatgaaactccattaaaaaaaaaaagtcaaatactgaaggtgataaataggttaattaccttgatctaatcatgccatattgtattgaaaaataataacatcactttttgtcccataaatatacacaacaataatttgtcaatatataattaaaaagaaaaagtgatttctagaagatgtttggaaggaaatcagatggtaaatcatatttactatgtctttaataatttcacactgtagccgtttcatgttttaaaaattgtaataaaaataaaaagtatagttctatacttaaattttttcattgaatgttgaactgtccactatgagggttgtggattttagttaatctttcactttggaaatgcctttgcagactaaattttgtttaagtgcacgagttgtgagtaagcctgaaaatagtttccttttttctaattttgcataaaagtgacataaatgccagctgctgcagctcagagcaaagaaaacagataatagatacaggaaccagtaaaacaatgctttcagagaatagtgctgtaaagaaaataaattaagataataaatggtagggcatattttagggcaatgttatgtaattagtaaaaaatggacattccactgaagctcaaagagctacatgttgtatgattccatgaatatatcttctagaaaaggaaaaattataagaacacaaaacagatcattggtttcctggggcatgcagcagcagaagaggtggactaccaagaggcacagtgaggtgttatgggagattagactgttctatgtcttgattgtggtggtaattatattatgtgtttctcaaaacttgcagaattgcaacataaaaagggtacatttttactataaattaattaggaataaaaactaatgaaaaggaaaaacaatgtcctgagaacaggatatatgacttgagatgcgaatgatgaatcccaggcagatggatctgcaagtgaaacctaagccagaacatccttcgtttgtttgagaaacaggaaggcaagagtcgtgtattagttctcatgcggctaacaaagatgtacccaagactgggtaatttattttaaaataggggtttaatcgactcacagttctgcatagctggggaggcctcataatcatggtggaaggcaaaggaggagcagagtcacgttttacatgacatgagagcttgtgcgggggaattcccatttattaaataatcactactacgagaacagtattggggaaatcacctcacgattcaattatctccacctggccccacctttgacatgtggggattattgcaattcaagatgagatttggggtggggacacagccaaaccatttcaggtggcctgagtctcctaaggaaagcaagggtgggaaataatgagatcaggtagcagatggaaactgaacacgaagacatagtactgtgcctgaaataagcttctgtgaattttctgctaatgtagaaggtcattctaggtcctagacagccttgaatctagaggaagaaagagatgacagaagctagataaatggagtaaagaaaaacatccgttgaatataaatccttccttccatggatgccactgccacccataatagaaaatttcatctcattgtaccctttcagaatgatagatatcacatcagacccacccagtaataatgccagtagtctgtttatatgacatgcacaatcattttaaaatcatacacatatatatataaaacaattgtctgtttaaacttaaagataatattgagatatattaaatgtacatttctgccctgtaattccttcacatgttatatgctatgggcaaagaaaacttaataaaggaaaaaaaaaaaacgccactttcagccttttcagttttctcttaggacaaaattgattttgcttttattgacattgtatagattgtgtcaaatttgcatagtaattctaagcctttccagttaattgacttttatatacaatacaaaaaagtccccccatgtcctgaacgtagtggtgaggcaagtcatttgagtgaacacctgcactcctgtatcaatatatatggttgttttgggaggttaatcaatcaatattttaaaataaaaaggtaaagaaaacaatgataaatatcctaaagacctatgaataggtgagaattgaagagaggcagtatggaattgcagtgtatagtgagaattctaaagttagaaaaacaggattcaactttcatatgccacatattagctctgcgattgtaaaaatgttacttaattcctctgattctaatttctcatttgtaaattggaagtaataataaaactatagggtttctttttgaaaataaaatgagatgcagcatttaacacattgcctggaacaggttaactgttagtttctattacttagagcagcacattgagataactcattaaaatatatctaatattttttactctacgggaaatgggagaaaaaaagacgagtatgtaaaaggttttacttcttaagtgtattactagagtaaagaccacaggaatgcatgcttgacaacataagggaaaaatgttttcaatcacattttaagacagcatagctgatgtagaagggtctagaaaagtcatgcagacaaggtcatgcagaaaattccagccttgactcttttggctgggtgatctggggcaagttgcttaatcttttaaagctcagtttcctctctgtgttttaggaataataaaagtactttccttaaagggtggttgttgagaattaaaagagaggatgtttagcatagtgtctggtacactgtcaaggtttaggaaatacagggataagcagaacatgctggtatgcatgaaggtagcatttacttaacacatgttcactgagtgtttactatgtatggggcattgtgatgaagtttgtaagaaacatcaagatgcacaaggcatcatctctgctattatacagcattcactactttagaaattgatcttcctgacagaagagattgggtttcgttctctgtattctcattgcttggcacagtcgctagcatataatatgtgcttagcaatatttttaaattgagtaactgtaatgataaatacacacacctcctttctaatgaaaactgagtttgaggaaagaaaaattgaattcccttcaagggagaaagagatctcactctttagtggctgttttacctgcttccaacagtattattgtttggctgcttttatttgttgtccgctactcctggtggattttgctcctgttattatcgcattcgtcattataattacttctgacccaaccacaaataggtcctctaatttgatcaagatctctctcgatctttatgcaccaagctcatttatttagtatattggctttcaaagtgtagtgcctggataaacagcatcagtatcacctgggacttgttagaattgaatattcctgggacctatcccagacttactgagtcagaaactcaggaggtgggtcacagaatctgtattttaatgagccctcccagcaatcctgatgcactcaaacatttaagaactgctttcatagcttcccccaactgttgtctctctcttaaagtatatgttttttttcttctgccgcggttcttggaataaattatagaacttgagctgaatgaattcttgtaactaaactgaacaatgacatccctgccatgttctgtcccaatagtgggttccacagagtgccaggctgacactcaggccttgtcaggtttcttgtctctagatccatttctgacctttccaagttgtcacctataaaattagattttttttaaatttttatctttctttaagaaagttgatcctggtgtctagaggtctaattctgcaccacagatcagtttcactgtctggtgacttaaagagtcttaatgctgttggactctgttatgttattccattcactgaggtaggcatggaatccctacagcctccctctctgattcacaaatcacaaagtatttagcaatatatggtagatttataatgttcataacagttagtcaatgtgagacattcagcagccagagttcactttccttaggaggtcagcagaggagacttcttggtgatgtcatcacacttgtcttgaaagacctttgagggccagccactattactaaagaaaaaagtataaggtgataaatagagtaatagtgagataaatatatcactctattctcaggagagtaggaagtcagatgatcttacctaactatttgacctgacactattttttgaaaaaaaattctaatcttaattgtagttctcatttaaagacctgaagagttttttgtttgttcatttgtttttgttttttatatttgtgcttaagctatttcaaagcttatgaatggaaattattttataaatcttttgattcatagaagtttcaacccataacactgaaggaaaatattggcatgccaagaattgtgattccatacaggaatagaatgtcatgcaaaaaaaattaaaaatgtatgttttctgattaatatgccatattcttattttcctggacctttaaaaatcataagaattgctatggatcagcctcacacaccactctttggatggttgtaagttctagtagaagtacatagtgctgacccttttaaaatttctctgttttacacagagaatataataatatatgcacccatattgacttctcttacattttttttctgaaaataatgagtacatctactgttgaagcaaatgcaaagattaatcacttgtaattttcccatcatatatataaatcgcacctttatttctggctttcacagaaagtaagtttcaaaatgagtttcaataaatacatattatcaaagttaaacatgagaatgaatttactttcattaaaaatcaatgttggacattattattaagaagagcaaggtgacaaaaatgtagtggaaatcaatgttggacattattaagaagagcaaggtgacaaaaatgtagtggaaacatccaaatagtcaaatgatctattgttatgaatttacctacgttaaattgatcatttgttaattatgttgttatgttaattatattatgttaattatgttgttaatttgatcattagtgagggaggaagatccagtagttaaagaaggcggggatgctaactgtccttgctatgtagtatgtcacaaggaaaactggtctcagagcaaataacattaaaagcaggcataacaagtgtcataccactctctaagctctattaaattccagatcctgttctttttgatgctctgacaacaccttgaatgtttacttgagatataattcataatattgtagcagcaacattcagctaaccttttggtcaaaatcagggcacatacaaaatctccaaataagcttccgaacacactgacaattcaattctcaaggttaaggtgacaatccagagggctgtaagttattgagatctctgggtccctctacttcattcttttgtgcagaagcaattgtatggcacttctatcttgtccaaactggaagaccagccgtttcactattcaatttgaaagtatgcttatgttatttatcaagcctctagccttgattggagataataatactcaaatgcttatagtagctgactgtggtacatggcctttggattacaattctttagttgctagctaaccaatctttcagaatattttattattaaataactaaccatgaattcttatatttctgattagtacgtttcaaattgtatattaaaaccaatctgctgtgtacatttgtgtgtgtgtgtgtgtgattcattgacaatataacaaaaattttaactttcttgaaaaggatactcttctcctctaacagtactcttctttagtctgtttttagctgtcagtactttgtgtagaaaaatttcctctgatatttgtttataattccaactgagtttatgtctgaatttgaactttttaaacttttccatgaattagactgtgagtttcctaggtagtaagcttttgagcacttatcgtgatgcctgacaaattacagatcctcaataagtagttgtggaatgaatgaatgaattcttgaacgggcctccttccacaattttagtactcagtctattacccaggcttgtgatctctgaaatattttgtagcttttgaatgttatctaacaaaacaatttttaaaacaatcaaaatatttaagtgacttttgttacagtaggaatgatataaagtctatgaattaaatttcacctaaatataaatattacaaagttgtaagggagctcttctagaacaaaaccaaacaaaaaagtagtttatctgtatacaatccaaaaatatggaaatcacttttcttgttcaaagataaatacattatcaaaaaatgtgatacattttagagcttctattgctcaatggatatgggaataaaataagaaaacacaaataacttcgattcagcctttaaccccgaagccacatgtttccactaacaagaagaaatccttgagagaaactttcagcaaaaagaatgttgacagaagagctttgagttagtcctgggtctttgcttaatgagataaagaagcaatcttggcagacaacttactgtaaaattccaacagtctttctcttttcatgtcatcaaaactttaattttctaaatctgtttactgggaagggcaaagagttctcctgtaagacttagatgtgtattttaagttccaagaactgatgagttataaccttgaaactgggaaagctttcacatttcttaaaatgtattgtagaaaactgttttttagtctcttaaagttgaaaactgtatttgctgaaagaggttggttttgcttaccatcatgtggcaatttatcattgaccatgacccagtgatctagctatgattaagtaaatctgatttaaaaagtctgcagtttctccagaattagaaatatatataatgatatttcccttgaaaaacttattttgtaagtaaaagcagtatctaatagattaactttaaaacataatgtaaaatctttttgtgtaaatacaatatacaatttgtataaagatatacaatatacaatttgtataaagatatacaatattactcctggaataatagcatgcatgcactgcctttttttcgttaaggtaacacatttctatgacatttttaagaagaaattgttttaaaatatctatgctaaaaacatcattacttttcttggtcctaaccctgatcaccagtctctggaagcaatcactttcactttaaatgtgtgtgtgtgtttgtgtgtgtgtatgtatacatgtatatgtcttgggcactttcttcagagaatttcacaggtgtaaatggaataatcaggacatatctatatctctttatatatttctatagagagagtgtgtgtgtatacatatgtatatatagttacagtgtatatatagagaaagttatataatgtgtgtgtatatatatatatatataaatatatatatgtatatgcatataattttccttataaaatatccctcctgtagtcctccatcctcctgtttctacctgcattcttcactgcctgggctggctactcctggtatttctctttgtcattgccctgattatgagaggctaaacaaaagtcatagatactttgtaaaacaatgaccagtgtaaaaataaaaagtaaacaagtgtccaaaagttctaatgggtgaataatattcaactgtattgttttaccataaattttgcaataaaatccctgtcattatcatttaagttcctctttacttactaacatttctctaaacagtcttgcataaaattgatttgtgtaattttctaagcactgtggatatggatatgtttccatggcaaaattttaatgttggtcgttctgggtgatgtgttcataggctattttattttaatgataaaatttgttcaattcgggactcgcagccaagatggccaaataggaacagctccggtctacagctcccagcatgaacgacgcagaagacgggtgatttctgcatttccatctgaggtaccaggttcatctcactagggagtgccagacagtgggtgcaggacagtgggtgcagcgcaccgtgcacgagccgaagcagggcgaggcattgcctcactcgggaagcacaaggggtcagggagttccctttcctagtcaaagaaaggggtgacagaaggcatctggaaaatcgggtcactcccaccctaatactgtgcttttccgacaggcttaaaaagcggtgcaccaggagattatatcccgcacctggctcggagggtcctacgcccacggagtctcgctggttgctagcacagcagtctgagatcaaactgcaaggtggcagggaggctgggggaggggcgcctgccattgcccaggcttgcttaggtaaacaaagcagccaggaagctggaactgggtggagcccaccacagctcaaggaggcctgcctgcctctgtaggctccacctctgggggcagggcacagacaaactaaaagacagcagtaacctctgcagacttaaatgtccctgtctgacagctttgaagagagcagtggctctcccagcatgcagctggagatttgagaatgggcagactgcctcctcaagtgggtccctgacccctgacctccgagcagcctaactgggaggcaccccccagtaggggcagactgacacctcacacggccgggtactcctctgagacaaaacttccagaggaatgatcagacagcagcattcgcggttcacgaaaatcctctgctctgcagccaccactactgatacccaggcaaacagggtctggagtggacctctagcaaactccaacaggcctgcagctgagggtcctgtctgttagaaggaaaactaacaaacataaaggacatccacaccaaaaacccatctgtacatcaccatcatcaaagaccaaaagtagataaaaccacaaagatggggaaaaaacagagcagaaaaactggaaactctgaaaagcagagcgcctctcctcctccaaaggcacgcagttcctcaccagcaacggaacaaagctggacggagaatgactttgacgagttgagagaataaggcttcagatgatcaaactactccgagctacaggaggaaattccaaccaaaggcaaagaagttaaaaactttgaaaaaaatttagacaaaagtataactagaataaccaatacagagaagtgcttaaaggagctgatggagctgaaagccaaggctcgagaactacgtgaagaatgcagaagcctcaggagccaatgcgatcaaccggaagaaagggtatcagtgatggaagatgaaataaatgaaatgaagcgagaagggaagtttagagaaaaaagaataaaaagaaacgaacaaagcctccaagaaatatgggactatgtgaaaagaccaaatctacgtctgactggtgtacctgacagtgatggggagaatggaaccaagttggaaaacactctgcaggatattatccaggagaacttccccaatctagcaaggcaggccaacattcagattcaggaaatacagagaacgccacaaagatactcctcgagaagagcaactccaagacacataattgtcaattcaccaaagttgaaatgaaggaaaaaatgttaagggcagccagagagaaaggtcgggttaccctcaaagggaagcccatcagactaacagcggatctctcggcagaaactctacaagccagaagagagtgggggccaatatgcaacattcataaagaaaagaattttcaacccagaatttcatatccagccaaactaagattcataagtgaaggagaaataaaatcctttacagacaagcaaatgctgagagattttgtcaccaccaggcctgccctaaaagagctcctgaaggaagcactaaacatggaaaggaacaactggtaccagccactgcaaaatcataccaaattgtaaagaccatcgatgctaggaagaaactgcatcaactaacgaacaaaataaccagctaacataatgacaggatgaaattcacgcataacaatattaactttaaatgtaaatggactaaattctccaattaaaagacacagactggcaaattggataaagagtcaagacttatcagtgtgctgtattcaggaaacccatctcacatgcagagacacacataggctcaaaataaaaggatggaggaagatctaccaagcaaatggaaaacaaaaaaaggcagggtttgcaatcctagtctctgataaaacagactttaaaccaacaaagatcaaaagagacaaagaaggccattacataatggtaaagggattaattcaacaagaagagctaactatcctaaatatatatgcacccaatacaggagcacccagattcataaagcaagtcctgagtgacctacaaagagacatagactcccacacaataataatgggagactttaacaccccactgtcaacatcagacagatcaacgagacagaaagttaacaaggatacccaggaattgaactcagctctgcaccaagtggacctaatagacatctacagaactctccaccccaaatcaacagaatatacattcttttcagcaccacaccacacctattccaaaattgaccacatagttggaagtaaagctctcctcagcaaatgtaaaagaacagaaattataacaaactgtctctcagaccacagtgcaatcaaaccagaaatcaggattaagaaactcactcaaaaccgctcaactacatggaaactgaacaacctgctcctgaatgactactgggtacataacgaaatgaaggcagaaataaagatgttctttgaaaccaacgagaacaaagacacaacataccagaatctctgggacgcattcaaagcagtgtgtagagggaaatttatagcactaaatgcccacaaaagaaagcagaaaagatccaaaactgacaccctaacatcacagttaaaagaactagaaaagcaagagcaaacacattcaaaagctagcagaaggcaagaaataactaaaatcagagcagaactgaaggaaatagagacacaaaaaacccttcaaaaaattaatgaatccaggaactggttttttgaaaggatcaacaaaattgatagaccgctagcaagactaataaagaaaaaaagagagaagaatcaaatagacacaataaaaaatgataaaggggatatcaccaccgatcccacagaaatacaaactaccatcagagaatactacaaacacctctacgcaaataaactagaaaatctagaagaaatggatacattccttgacacatacaccctcccaagactaatccaggaagaagttgaatctccgaatagaccaataacaggctctgaaattgtggcaataatcaatagcttaccaaccaaaaagagtccaggaccagatggattcacagccgaattctaccagaggtacaaggaggaactggtaccattccttctgaaactattccaatcaatagaaaaagagggaatcctccctaactcattttatgaggccagcatcatcctgataccaaagcctggcagagacacaaccaaaaaagagaattttagaccaatatccttgatgaacactgatgcaaaaatcctcaaaaaaatattggcaaactgaatccagcagcacatcaaacagcttatcaccttgatcaagtgggcttcatccctgggatgcaaggctggttcaatatatgcaaatcaataaatgtaatccagcatataaacagaaccaaagacaaaaaccacatgattatctcaatagatgcagaaaaggcctttgacaaaattcaacaacccttcatgctaaaaactctcaataaattaggtattgatgggatgtatggcaaaataataagagctatctatgacaaacccacagccaatatcatactgaatgggcagaaactggaagcactccctttgaaaactggcacaagacagggatgccctctctcaccactcctattcaacatagtgttggaagttctggccagggcaattaggcaggagaaggaaataaagggtattcaattaggaaaagaggaagtcaaattgtccctgcttgcagatgacatgatagtatatctggaaaaccccattgtctcagcccaaaatctccttaagctgataagcaacttcagcaaagtctcaggatacaaaatcaatgcacaaaaatcacaagcattcttatacaccaataacagacaaacagagagccaaatcatgtgtgaactcccattcacaattgcttcaaagaaaaaaaaatacctaggaatccaactcacaagggatgtgaaggacctcttcaaggagaactacaaaccacttctcaatgaaataaaacaggatacaaagaaatggaagaacattccatgctcatgggtaggaagaatcaatatcgtgaaaatggccatactgcccaaggtaatttatagattcaatgccatccccatcaagctatcaatgactttcttcacagaattggaaaaaactactttaaagttcatatggcaccaaaaaagagcccgcatcgccaagtcaatcctaagccaaaagaacaaagctggaggcatcacgctacctgacttcaaagtatactataaggctacagtaaccaaaacagcatggtactggtaccaaaatagagatatagatcaatggaacagaacagagccctcagaaataatgtcgcatatctacaactatctgatctttgacaaaccggagaaaaacaggcaatggggaaaggattccctatttaataaatggtgctgggaaaactggctagccatacgtagaaagctgaaactggaacccttccttataccttatacaaaaattaattcaggatggattaaagacttaaatgttagacctaaaaccataaaaaccctagaagaaaacctaggcattaccattcaggacataggcatgggcaaggacttcatgtctaaaacaccaaaagcaatggcaacaaaagccaaaattgacaaatgggatctaattaaactaaagagcttctgcacagcaaaagaaactaccatcagagtgaacaggcaacctacaaaatgggagaaaattttcgcaacctactcatctgacaaagggctagtatccagaatctacaatgaactcaaacaaatttacaagaaaaaaaaacaaacaaccccatcaaaaagtgggcaaaggacatgaacagacacttctcaaaagaagacatttatgcagccaaaaagcacatgaaaaaatgctcaccatcactggccattagagaaatgcaaatcaaaaccacaatgagataccatctcacaccagttagaatggcaatcattaaaaagtcaggaaacaacaggtgctggagaggatgtggagaaataggaacacttttacactgtgggtgggagtgtaaactagttcaacccttgtggaagtcagtgtggcgtttcctcagggatctagaactagaaataccatttgacccagccatcctattactgggtatatacccaaaggactataaatcatgctgctataaagacacatgcacacgtatgtttattgcggcactattcacaatagcaaagacttggaaccaacccaaatgtccaacaatgatagactggatgaagaaaatgtggcacatatacaccatggaatactatgcagccataagaaatgatgagttcatgtcctttgtagggacatggatgaaattggaaatcatcattctcagtaaactattacaagaacaaaaaaccaaacaccgcatattctcactcatagatgggaattgaacaatgagaacacatggacacaggaaggggaccatcacactccgtggcctgttgtggggtggggggagggggaaggggggagggagagcaataggagatatacctaatgctaaatgacgagttaatgggtgcagcacactagcatggcacatgtatacatatgtaactaacctgcacattgtgcacatgtaccataaaactttaataataataaaattaaaaaaaattgttcaattcaaattttcaacaatggacatgtattcgcatttataattttgaaaagaaaaaaatggacaatggtatttttatactattttaagctccccaatggcagacattattttcactgaatcatgaccaagtcaagttcagtgctgggaagaggggacttacattaaatatataatcagttacttccaggctctgcctcttattggataaggatagacactgtgacatcagagatcaccgtgctgtggaccgaacaaatgccatgtaaacagtgaccatgaccttttatgatcactgtctttctggaatttgacaaactcagagaaaagtttagaggaatgtatagactaaatagtccatttgctattgtgacattgatgatgaaacctttaagaaacttttgatttaaaatgtgttcatgaccttgtgttcataatttcacaattgagaggcgtccctccacattcttggaactgtgcacccattggaacctttaaggtaaatctaaccagggaagtttctcctcagaagaagatggcatccttgatgtgaacagcttttcccaagatcatgaatcaagacttctgtactatcttgagactcttatctttgagtaatttttccccttgtttaggcctctatgaacaatagaaatgaaaagaggtcttctgtgtgcacttactgggtatacttttacttgtgaaggatttggcagccagacttatatgtagataaccttatattttgatagataaaatatgaaagcccaatgtaggtgagagacttaaatggtacatacgttgcctcataatcagtcagaaacagaactttggttcactccctttgacccacatcatgtgttaaagagaaggttgccaggaggccttcactcttctagaagggcatcatttgttaggtactttttccatggtttggagtaaaagaagcaatgattagaaatgtatccctcatgataagctgtctagcaaactctactttaaaggctataattacacagcagattttaaattctcttgtgaaagttatgctaaataatcgaattgctttagattgctgactggctaaacagaagtatctgtgcagctgctggcacttatgtcttgtggagaaagcattgggtattacagacactcagttgtaggggattaagaagaggactacttaatcaagcgagtaaactctttatctagctcattctttgatctatttgattttaagtgatttggtttatggagaccctagtagggaccatactttcaactcttggtgttatcctcccgatagtcataatagaagtctccctggtgtgctgtatgctctcaaaggttttaaatgtttgcattcagacatctccagaatgtcaggtagtctctcttcaacagaaatgacaagagctgaaagaactatgcaaccatgggaaaaccgtaatctatgaatgaggtgctaagaccggaaacccaaaatgatggtaactgagagtagcattaaggccctaaagtttggtcacactctcacctaaatgagaacctgaccaaaaagggggaattcttaaaacaaaattacgggaggctattgtttggactgagctcaatcactaggcaccaacagaagaaactgtataaaaatggagtcacttgtgctaagtgtgacataatcaagctaagactttaaggaaacacatagatcctagaacagacgaggttttgtttttctcctgcaaacaggacgtttctgtataaggaggtaccatctactcaatcctcattcccaccttgcaaaacccactgttctactgttttccagtgggtttcaagaccaaataagtacatttacgatggtgatagtgacatcgatgaataaagttttggccaatctctcaaaattgagaaaatgaccaaaagcggggaattgttaaagcaaactaactgtggcctaagaaggactccttacttttatatctgagtccttgtggatgaaccataacctaacttaataggtagacaagattgaaaacctgacttagaagtatgggattgtcacaatatctgaatcttggcaaatcccagcagccatacttcaaccagtcatagactgctgagtgtttaaactgtgttcaaagagggcaaacactgaactgtaaccaatccagttgtttccatacctcacttccaatttctgtaggccacttcccttttatgtctatagatcttcttccaccatgtggctgtactagagtctctgtgaacctgctgtgattctggaggctgcctgattcacgaaggtttcattgcttcactaaactcctttaaatttaaaataaaataaaatgtgttcatgaacatgagttctaggttggttttggcagttttgtaagatcaataaaagcttcatttaatttatttgaaaacagtgtttaggaataccccaaagtatgttctcacatcgagggatttagaaagtgaaaaccggccgggcgcagtggctcatgcctgtaatctcagcactttgggaggccaaggcaggcggatcacgaggtcaggagattaagaccatcctggctaacacagtgaaaccccgtctctacttaaaaaaaatagaaaaacttagcagggtgtggtggcacgcgcctgtagtcccgggaggtggagtttgcagtgagctgtgatcacgccactgcactccagcctgggtgacagggtgagactcttgtctcaaaaaaaaaaataaaaataaaataaaataaaataaataaaagcgaaaaccgactgttaatacttgtacactttcaaaatgatgaatattttaaagtttaagttgttctcactagagttaactccaggatttctttatttctgttaagaagaggaaaccttgctatgggtagtgcttttctcacaagcttttctcacaggggcacttgcctgaaattatgtggtttattttggtttataaaaagtggctgggacaaggctgcaaaggttggtagtaaagtacctgacacctgccctggaaacttccattggctcttgctcttacttttattttattaaaaaaatgcacgtgtaagagagatggtgttgaatatgttgtaattataaataatgccaacctaaaataattaaaaagggttagaatctagtttaataagagtttattcaagcacaaagtttgaagacagccactcaggaagcacaggttacaaagactaaaagtcagtgttctgatggtagaagcttagggttgtttatagagacaaagtttaaggaagctaaaaagaatttcaacatctttctgtacaaggctggatgcatatttacaatgatctgattagttgagactgtatttttctttcaggaagggtatatttaacattccaccctgaagatgtaacagtcatgaggtcgtttgaaccatctggtctgagttaggtacatgacaataaaagaggtagttaatctataacaaagataagtgaattgaaggggtaagatgtctgatctctagtctcccctagtcatttacagagcaagaacaatgaagaagagagtaaatctataatctaagaagctgaacttgcacacatactatgtgactcatctccaaagcttaactttccccttggcgtaataaattaagagcgtcctaaaattacaatccacagataagtatagatacagcgctttatatgtgtgtgtttatatatatctctctgtatatttacatatataatatataagtagtagaagtagaagtagttttatatattatatatacatatatgtgtgtacatgtatacatgtgtgtatacatatgtacacatatatatgtatatataatatataaaactacttcttttgtacattgtattctgcttctaagaatgacatcactgcaaaaacaaatccctccactccacatccatgttacagtgaaacatttctcattaatgctccatcacttattaatttaaatgttagattctgtttagggtattatgtttataatttttattctgattgccatgtaaaaatatttcgttaaaatattgtaaagtatttttgaaatgtcttgctaatcttattattctgtatattccttattagcccatcagcttctcgagggacaaaaaattacgcatttcatttttattttgtgtgctcaaatctattgtcttattcatcattcaacaaatatttattgagcttacgatataccaagccaagcattagatattggtagtcccagaaatctaacaatcctgatgaattgagtgattattgaaagtgaatttacaaattcatcatccttctatctaagttttagtgcagaaagacattgtcaatgcaggctagcctttactgtaggacaaatggaaacctgacatttacaagaaaatataatttcataatgtatctaggaggaaaaatatttatcactgccaacccaggaaaaaatagaaaacttaacaaatgctaggtattgaccaaagaaacacatgatcaactgtaaatctacccccaaatgagaaaaaatgcattttttcttctactagtagctctaagcaagcggcagtctacaatgttttttcttgttctatagtatgtttcagaaactcacaataggagttcgttttgaattcttctgtgtagctcattttccatttggggaatctatttcttatccatttgtccacatctataactagcaaatagagaattcaatatagcaaatgtgcctacagtaaattcaaaattgcctctcatccatttgtgagcaacacataaataatgaaggcgacattaaaacttcgggtttttttatttttacttctttctctgaaatatcttttccagcaaaataaatggtttgaaataattatctatttagaagcactgcaatagctgtgggaatgtgattgccatttacctttcaggattttacggttcccatgagaagaagaaattttttgattccttgattctcttttccttcattatacttcattcttaacccatcagttttttaatttgcctgtaatagatggggctcagtgtctcaagagcatcccaattttatggttatagaaaccagacttagtagacaaaatgtttccttttgagcaaagacttagtggttttagcacctacaaaaaaactaaaggaataaaatggaaatgcaagggaaaccaaaatgcattaaaggttaaatttttcaatatttgtatttctttcttaacttggcacaaatgagattttttttcagttttttacattttatttttgactgctttgaatagtgtcggcttgccaaagtctcaccggactaatgcttacagcagaatttaacacattgccaaactaaccctgaggtgtggtttacactacagaaaagagtgttttggcacaattgccaatttagaaagtacgaaaggagtggcagaacttattgccatagagttagaattttacatctatactgcctattttttaaaatttaatatttcattgatgtcacgaaaaacattctcatgcgtcatattttggtccctttctttttttatttttattatttatttatttattttttgagatggagtcttgctctgtcgccaggctggagtgcagtggcacgatttgggctcactgcaacctctgcctcccgagttctcttgcctcagcctccctagtagctgggattacagtcgcccgccaccacgtccagctaattttttgtattttagtagagacgggtttcaccttgttgtccaggatgtcttgatctcctgacctcgtgatctgcctgcctcagcctcccaaagtgctaggattacaggcgtgagccaccgcacccagccccttatttttttaacagagtgttaaaggtggagtgtggaaggtcttaataaattatgtgtttgctgtgtgtatgtattaccatattacacatgcagtgataagaagccattctcatgataccttgttggccaaactgggttgaaattgaatttaagctccacagagattgtgactacacattagtgtagtaaatatatatatatacacacacacacacacacacaatatggtgtgtatatatatacacacacactgcactatatatatatacagtcgtatacatacagttgctgtatatatagttgttatatatatgtgtgtgtgtgtatatacatatagagagaaagagagagaaagagagagagagagaattgttatattatcttgctaaatgggccactttctaattatataattaccatctttgtctctttttacagcttttgacttaaattgtattttatctggtttaattctagctattcttgctcttttttaaagtttctatttgcatgagacatctttttccatttctgtactatagttaggtcctatttttttaaaccattcagccacttcttatcttttggttggataatttaattaatttacattcaaagtaattattgataggtaataacttactacactatattgttcattgtttcccagttgttttgaagattctttcttcttctcttactgtcttctttgtggtgattttctctagtggtacaattattttgttgctttttatttttagtgtatcaaagttatttgctttgtgattatcatgaagcttgcaaaagtcatcttacagttataacaggatattttaagcaaaagcaacttatctttgatcacaaaaaagcaactctacactttaactctacttcccctctacatttcaattttggatgtcacaacttttatcattttatattggataatccttaacaaattactgtagtgattactaatttaatagttttgtcttttaaccttcatactaatgatatacatgatttacacaccgccattatagtatgaagatagtctgaactttactttgtattttctcttaccaatgagttttattctttcagatgtttttgtgttaatcttagtgtcctgttctttcaactcatagaaccctctttatcatttcttctaacacaggtttggtggtgatgagctccctcagctttgtttgtctagaaaagtctttgtctcttttttatttctgaagaacagttttcctgggtatgctactcttggttgacagatttttttttttcttcagcatgttggatatattatccaaatcttttctggactgtaagatttctgctgagtgtgtctccagttaggtatattggaacttccttatatgttatttgctgctttagtcttgctgttttcagaattctctctttgtcttcaatttttgatagtttgattttaatatgtcttggggtattcttatttgtatagaatctgaatgaagaactttgaccttcctgtacctggatatttttatcttttcctgagtttggaaatgtttctgctcctatttctttaaatatgctttctattcttttaatatttctctttcctttatttaacttctataactcatatagttgcttttttgatgttgtctcataattcttatgcacactggaatggaatggaaaaataccttcaaaattctatgaagaaaaaatatagatgtaaaattctctacataactaaactatcagtgaaacagtgggttagatgaacaaatttatatatgctggagcctaaaagaaaaaccaactttactcacttactctccctcagcagagagaataagatatgtgaaggcgctcatcaaattcaaataaatgacattacagttattgaaatatataatacatgggagaatgaaagaagattgggaaaaaggagtgaggtacaaggactattacaagaatgtggctgaaaaacagaaaatgtttcaaaatgattgtaactgttattacaagctatatatcagttattattaaaaacaaaaaacttgcataaattaaaataaaaaggccgacactgcagtgggaggaaaaggacaatatatatgcaagaataacttactgaaaagacacaggagtggccaatgaaaaacaaagaatgcatgttcaacctatcattaagaagaataataaatgaaataccacaattacctattgactgagaatcaaatttatgtataatgccaatgttagtgtgttttggagaactgccaatgccaatgttaattgttataatctttccaaaatatcgacattgaatgttgcctgcatcaacactaaaataggcttaatctttgaccttactattccaccttttattataaatgattgggaatagctcttaaaggacattgaaatgtttctattacaacataatttatcacagtaaaaatttagaaatagtgttcatttttacatgttggcttaaaactgtaaaataaaatagagtgtacaattaacccttgaacaatgtgagaattaagggcacagacccccctgtcatgcagtcaaatacccatatataatttttgactcctaaaaaacattatagcctactgttgaccataagccttacttgtaatatagtcaattaacgtgtattttatgtttatgtattatatactgtattcttactttaaagagaaaggaaaatggtattaagaaactcataagaaagagaaaatgaggccgaggcaggtggttcacctgagatcaggaattcgagaccagcctggccaacatggcgaaatcctgtctctactaaaaatacaaaaattagccgggtgtggtggcatgcacctggaatcctagctactaggcaggctgaggcaagagaatcgcttaaacctgggagacagaggttgcagtgagctgagatcatgccactgcactccagcctgggtgacagagtaagattctgtctcaaacaaacaaagcaaacaaagaaaaagagagatagagaaaatacatttacagtactgtactgtatttatcaatactctaagttacatcatctgtttacaaggtgaattgttggtctgaagtagtagcaaccgcagctgcaggcttctgtctatggtacatatcatgccatttagcttttactggtgatgtcatgacttttctctgcttcttgggagcacttcgagcatcactagtggcaccttgtatgggccccatggtgtcattcaagatttacagtattgcactaaaaatgataagaactacaggagaactgagagaaattacttactactgcaatactcaattactggagagataaactgcttacatgaagatgattagcataacacagcattttaggaggatactgacaacaccagctcaccgcaatagcagtaactataaagttattactatagtttaatttgtactatagttaattttatagttatgatttaatactgcacctttacttttgtttatatttctctcaactgcaaatggtaccatatatggtctgcgtttctgtgtgtaagttttgataaatttgaacttttcatactagatttgtgtatcatttatggtagtaaattatgaaatagacgagtatcaacatatattttatatgttcctgacatggctatttttttcttaatttttctatatttctaggctgtgagattcatctacaggtttttttttttcaaattgttgcaaatctccaatcatttttcaatacgtttatttttaaaaatccatgtataatagacctgtgaagttcaaacccatgttgttcaaagatcaactgtagatttttttaattttacagttatcaagcacatttattatgtgttgcatatggtatattgaatcttaattctgtgttatatcttaatttttatgaaacaacctactgtagttataaatatgataataaattagaaaatattcataaaggaataatgttaagtggataaggtaaaatactaagcagcaacgatgacattcctaaacttgcaagattattaatgtagatatacatatgcatagaaaaatcttaaggctgcccaggcgcgggggctcacacctgtaatgccagcactttgggaggccaaggtgggcggatcacgaggtcatgagatggagaccatcctggctaacacggtgaaaccccatctctactaaaaatataaaaaaattgctggacgtggtggagggcgcctgtagtcccagctactcgggaggctgaggcaggagaatggcgtgaacccaggaggcggagcttgcagtgagccgagatcgtgccactgcactctggcctgggcgacagtgcgagactccgtctaaaaaaaaaaaagaaaaagaaaaagaaaaatcgtaaggctatgcatagcaatttaatggtagttgtctcaaggtggtggggttatgaatgatttatgttctgtcttttctgttggcatttctttttatatttttcttctgtgaacacctgttgctataaaaatactcagtgcacgtgataataaacatataaagcattctgtatagtctcactgacatttgaaaaaagcctctaggttttatttctcattgtgatcattgcaatgggcatcagaactgcatgtgtaaaaacgatcttgtctgttcttgttatcgtctgcaccctttatctaacatctgtatcactgcttagctggaagcatctcctttagcacggcactgccatgttttatgttctaatgtaaacttgtgtgacttagctatggttaaatagaaataactggtgtttcagcttgatttttgtaacagattctgaggcacgtttttctgtctcaacccgggaatatccatttctgcaccaggacaaattaattacaatactgatgtttaagtatttatggttagtcaaatcttgaatcaaatcgtaacagaaatggaaaacagaaaataagaagagagaggagaaggggaggaggaaaaaggcgcagcagcaacagctattttgagagattgggaaggatcttaattgaaaaaaattgttctttccccaggcttggtcggcgaatcacttaatccactcatcccttcgtcttttcatagaattaggaaagatatttagctcaggccctagaatcagactaatgctgactcgttcttgtctcgaagggctttctacaatttactgcattcagctccatactattaataataatgttgctgcttttcttaaaatccatgttggaaatgtaagaaaatgtaaagaaaattttatttcatatttcattttacatctccaaagcccccaccatctccagaaagagtacaatgatcattttctttgtctctttatatttgaacaatcatcacaacactaaaactacttcgccgttgtgctaagacctcctcctgcctagattgccaccatggcccaccttctccaatttagaagagggaaaggtggggccaaagagagacctttggtgggttttctaccaataagtttaaaaagatactgaaaaggagacccttccttccttcccttccttccttccttccttcctttccttctttccttccttccttccttctttccttccttccttcctttcttctttccttccttcctcccttttctttctctctctctctctgcttcaaatacactttttattcccctgtagaatcagaaaatatctgactgcttgagtctaaatctaccagactaaggaagcctcggaaaagcttttactatttcctcttccctgtctgtgatttttaaaagcatagaaataaaagttcattgtttttatgttatttgtctaaatatatttccatgatatattttaataaaacattccttaggtatttatagttataggattgatggaacagatataatataaagtaagtaaaaaatcttcatttcaaataaagtatccaaaacaaaaatttgattattgagctttaataacattttttaggtttaggggaggcttaatttggggaactggctattagaaaaaaattatttgaaattgcaatagataatgagctttaaaggtaaaaggttggtgcaaaagtaattacagtttcagtctgtgaatttaaaatcatgtataactaggctcaaacacatctttattaattaaaataggaaccattacaatcaacacattattgccaaggagaagtaaatttattcctgtagcgtaaaaagccatgcttcaggatttgatgaattcttggaaagcattttctacatcttgctggttccaacaactcaaaaactgcaattactttttcactcacctaatattagattagaaaaagatcattatttaaaactgataattgaaaaagagcaaatacaagcattcacaaaatccccccaaaaaagcatctttatagatatttttgttcctgtagatttagactgcatcttctttcattgtcatttcttatgacaattatttgcaataaaaatatcaatttatttatttatttatttatttttgagatggagtttcactgttgttgcccaggttggagtgcagtggcgtgacctcagctccctgtaacttctgcctcccatgtacgagtagttctcttgcctcagcctcctgagtatctgggattacaggcacctgccatcacacctggctaaaaatatgaagttagaaaaaaaaaagtttggtcattctgctaaagtggtggtgtacattttgagttgtcattttttaaatttttttctccagcttctcaaattgtcattagcaatgtcatataaatttgtaaatttttaagataattgacagctttgtgaacacccctatcaagttccttctctctttctctctctctctctctctctctctctatatatatatatatatatacatacacacacacacacatatatctttctatatatattgtatatatatactatatatatacatatatatctttctagatatatatagtgtgtatgtatgtgtgtgtgtgtgtatgtgtgtgtgtgtgtatatatatatatatatacatatatatatatatatatatatgtatatatctttcaaaatatttcaaagccaggcatggtagctcatgcctgtaattcaaacatgttgggaggctgaggcaggatgattgcttgagatcaggggtttgagaccagcctgggcaacatagcaaaaccctgttgctacaaaaaataaaataaaattagctggacatggtggggtgcctgtagtcccagctactcaggagactgaggtgggaggatcacttgaacctattacttcgaggctacagcgagctataatggtgccattgccctgcagcatgaatgacaaaggcagaatttgtttcagcaacaacaacaacaaaatttcaagttttataatatttgatgtagcccttaattttaaatgctttttaaaatttataacaaatttttctcaccttataatagcatataaaaagttttatgttacctttgttgatgttagtgtattttgtcaaatgagcaaaaggtacatttgaatgaaggtattcatataagttactacttggattatcaaaaaaagccaagcagctattctgtttgctatttatctttttctcttaataaatcccttgtttggtattatttaaaacaagggccaaatattttatgccaatttctttgcatattgcatgtgatattttctcctatgactctggggttggatagtggtgacacagaccatgttgcctgcaaagcctaaaataaagacagaaaaattatttttgacagaaaattaagttcatgatgtaagataattttgtggtaatttttgttataatttgttctcaatgttaaaataatttctgttaattttattgcttatctttatttgttgtgtcattttctattaattttgcatctaaatattatctctatacttttataaattaatgttagtctgacaaaaaaaatagccttcatttagggcctaatcaggagtttgaacttctcaattatatttaaatcaaacattccaaaacatatgttcacattacagtatataagtgctttataaaatgtatttccttcagtaaaacaataaattttgagtatataattgtgtatgatacattatgaagtagaagacaactctttggatgaggtgttgaattaaatacattccttgcaattttatacatctgattgttgcaagcattctccacaaattaacttgtggtggtgtacatgacaaagcttttttctttacaacacaggacacagatgttgggcctcatatgacttgttcctatcattatgcaacctcacactgtgtaattcatgtagcaatgctgtatagactggcaggtagacagaggagcaatttcaacattactaggctttaggggaagtgtgatggagaggaagcaggaataatacaatggttatagccagtcatgcttaactatattacttttgcaagttttatgaaaatacctgctatgagaagacactgcaagagctcctcccagggcctttaaccgactgtgtaagtgaggggcttaagcttcattttcttcataataggttcatctttgcatatcaggatacatagaaggaaagataaaacaattttgaaagccaatcaaagcatatataaagcctagatgggcacatattttttattgtgacattaagatagataggataaatgaaattgtcaagatacatgcaagcttctgccccagggcatttcccctatacggaaacagacctcagatcgcactcttccagcagtcttatcccctgatgtctctgaactacatcggtacttcagattctatttttatagttctttgcttttgccacaacctctcgtctgatttctccacgttgcctggtaaacctctatggtcctgaggttttgactctgatctgaaaactgtccctcttctgcaggtcttttttccatcaccatccttttcaaagctgctaatttagacaaatttcctgaggttctagtggaagtggggctacaaatacccttgcattatttagtcataattatttctgggaagaaatctaaatttcttgttttgttttctcagttatatcacaatgcatttgttgaattgaaattgtgatcttcaagcctcgttttcctaatttgtcccttaaagaagggaataggccaatgttctcatggtgccattgctttgatgttgaggcacttacagacctgatccaggactcttaacatttctccctgttcaaggtccattatgtggtgcagagccatggtgaaggatatgagcacaaagctctgtgggttttgttttcctttgtttttgtctttttaatctgtaaattgattcttgctaatcacttgaggaaaacaatgacataataatactatgtgcgaagaatttagcaaaaattggtgctcatctgtcaggaaatgattaatatgattccaaggatgaaatgtggaagcattaacaagagaaacaataacaacagtgatttttgccttaggtatcagaggccccaaaatacaaatttcctaaatccattagaaaaataattgccttaatatgaaaacatgtgcatctaacaactttctgaaataattatattatctgaaagtacatgtagatggtctggctttctttaaagatgtttataaaaattcaagataaatggttaataaccttctatccttgggaatcctaattttgccattctttatgcagacaattacttttctttctttttttataatactttaagttctgggatacatgtgcaggtttgttacataggtatacacatgccacagtggtttgctgcacccattaacccgccatctacattaggtatttctcctaatgctctccctccccttgccccccaccaccaacaggcaccgatgtgtgatcttcccctctctgtgtccgtgtgttctcagtgtttaattaccacttatgagtgagaatatgtggtgtttgttttctgttcttgtgttaatttgctgagaatgatggtttccacctttatccatgtccctgcaaaggacatgaactcattcttttctatggctgcataatattccatggtgtatatgtgccacattttttttagccagtctatcattgatggggatctgggctggttccaagtctttgctattgtggatagtgctgcaataaacagacttgtgcatgtgtctttagagtagaatgatttataatcctttgggcatatacctagtcatgggattgctgggtctaatggtatttctggttctagatccctgaataattgccacactgtcttccacaatggttgaactaatttacgctcccaccaacagtgtaaaagtgttcctatttctccacatcctctccagcatctgttgtttcctgactttttaataatcacctttctaactggcgtgagatggtatctcatcgtggttttgatttgcatttctgtaatgaccaatgattatgagctttttttcatatgtttgttggccacataaatgtccgcttttgagaagtgtctgttcatatccttcacccactttttgatgggcttgtttgattttttcttgtaaatttgcttaagttccttgtagattctggatattagccctttgtcagatggatagattgcagaatttttctcccattctacaggttgcctgttcactctgatgatagtttattttgctgtgcacaagctctttagtttaattagatcccatttgtcaattttggcttttgtggccattgcttttggtgttttacatatgaagagtttgcccatgtctatattctgaatggtattgcctaggttttcttctagggtttttatggttttaggtcttatatttaagtccttaatccatcttgagttaatttttgtataaggtgtgaggaaggggtccagtttcggttttctgcatatggctagctaattttcccaacaccatttattaaatagggaatgctttccccattgcttgtttttatcaggtttgtcaaagatccgatggttgtagatgtgtgacattatttctgaggcatctgtttgttccattggtctatatgtctgttttgttaccagtaccatgctgttttggttactgtagccttgtaagataatttgaagtcaggtagtgtgatttctccagctttgttctttttgcataggattgtcttgactatacgggctcttttttgtttccatataaaatttaaaatagtttttctaattctgtgaagaaagtcaatggtagcttgatggggatatcatttaatctgtaagttactttgggcagtatggccattttcgcgatattgattcttcctatccatgagcatggaatgtttttacatcatcctgataccaaaacctggcagagacataacaaaagaaaatttcaggccagtatccctgatgaacatcgacacaaaaatcctcaataaaatactggcaaaccgaatacagcagcacattaaaaacttatccgccatgatgaagacagcttcatccctgggatgcaaggctggttcaacatacacaaatcaatagacataatccatcacataaacagaaccaatgagaaaagctacatgataatctcaatagatgctgaaaaggccttcgataaaatttaacacctcttcatgctaaaaactctcaataaactaggtattgttggaacatatctcaaaataataagagctatttatgacagacccacagccaatatcatactgaatgggcaaaagttggaagcattccatttgaaaactggcacaagacaagtatgccctctctcaccactcctattcaacagagtattggaagttctggccagggcaatcaggcaaggaaagaaataaaatgtattcaaaaaggaaaagaggaagtcaaattgtctctgtttgcagataatatgattgtatgtttaggaaaccccatcgcctcagccacaaatctcctgaagctgataagcaacttcggcgaagtctcaggatataaaatcaatgtgcaaaaatcacaagcattcctatacaccaataatagacaaacaaagagccaaatcatgagtgaactcccattcacaattgctacacagaaaataaaatacctaagaatacaacttacaagggatgtgaaggacctctttaaggagaactacaaaccacagctcaaggaaataagaaaggacttttcttacatttctaaaggcacataagatcacagagacagaagatgtccagtagatttattttcattcctctagtacaaattttttatagacagaatcataggaatttctgaacctaaaaatattaatcttcatgccacctatttaaaggaaatgcaagcacatgtttattgtaagtgacagtcctctgagatgatagttgatctgtgttcatggcttaagattattatattcagtgagaatgaaattacttctattgaaatcttggaagtaaatgaacagatcatagaatattctagctctcaaggctggtctcagcaagacaatatctgggtagaaaaaacttgatggatagtcaaggatattttagatctgagtaatcaatagcaggtgatggagaaaaagagccatataataagtggtcttataagcatttttgctgctcaagaagtaccagccacaaagaaccaatactattttaaggattaaagttaccaaactatagtagaatgtatgtgtacttaggaatcacatatgtatcatttagtgtgtatgtcactagttctgcaacttgtagtttaaactagttttctcatgtttaacgagatgataaaaaaaactaactcagaagattgtagtataaataaaaagcgatgacatctcgttttacataaattattgcatttgtcattcattcagtaaatgctagctatttttacttttctggaaactagggaaaataacttctatataggtttgtaacgaattccaattacgaaattcgaaataagcataaaacaatacctcttgcatcatatataatcaaacattaaattaccttttgaacaaaaatctttgtttattaattttactggcccccaaatggctatgaacttgttgaaaatggagatatcacattcatctttttattccccatttctagtagagtacctgagacaaagctagcaaatgccgactgattgaacaattccagctctgttattaaaatcatcatataacacaaacttgtcaatggaaaagttaactttcagataccaaaaaaagggaaataagctattgcaaataataatcaggtaaaaaaatatttattctgtttcagcatagtgttataaatattgaaatgtaaattaaaggcagtagggcacacctatatcttgtttctagtttttgctgatagctgtatataatcaactattattgctttgataccaccatataacgtgggttataagattttcagataaaagcaactcttatttcatttgtttttcttgaattactccatataggaagaggctttggaatcgtatttcttgctttgaaattttatttcttgcatttatatgcctttgcaataaaatcgtgttaacttataatctctcacgcaatggtttctcctagtgtttaataaaatggtattaagggtaactgctactattttttctaaaattagaaggtaacattgaatggacacacagcagatacatgttacattctgaaatgtatgctttgctggagcagaatgaatgcaatcaatgtaatggaaatgctgcactaatggctcattaaacatggaaagtatgcatagatgaaaaaagtctgtgcatatgtttcagttcactgaaggaagcaatgaactataatgtggaaagaaaaggaaacatacttctttacgtaaatattcttacttctggaaaagaattgttgaatcagtcaggaatttgacagcaagatttcaactattggagcagacaactttatattgtaattgatggatctggtggacttttaaatattttttttccctattctgtgctttttcacattgtttctatatctttttgtttttttgcaaagttctttaattgatcaatattttcttttgtgatatgtgttttattgctcacaagaaaaaaatttctctatttaaatgttatactctcttacactttctttcaaactgtcacttataccactgcaattcaccccaaattattttagtatatgatgtgaaatccaagtctagctttacttttttcacctttattcaattgtcccagaaacatttatcaattattccacatttcttcactgatttgtaatatgccctttgtcttaaaccatgcaaagctccccagcatcaatagaaagagagaggaagtagatgataaccttttgcagtgggaaacaaaaaagatattttaaaactcttgtttgtgtttggaactgtcacctcctatgacatgtcaaacaaccttatttggcattggatagtgtaagtaattttttgccctgacaaaatatatttaggtacccacttgagcaaaacttataatatagatttaatcatatattcactgttatcatcgacttcattgtgttcttctacctctgcctgatgcacctcttgattattcagcattgttgccaagcatttgctgttagtagctgataacattcatcttcttttgctaaatatttctcatatacaagaagatttaagactgtttatccctgtagttggaagatttttcctctaaaagctgtttatacttttcctagcacgaagacctgcttatatgccacacaagtgtctcttaaaaagttagtcactcaatgccctgctaataggagtgaaaaagacactagaaacaaaaatcttttctaaccagaaaaccacttttgtataaattttgagctccttgcaccacagtgactacagtgtgcctcactaaggtaaacatagaaaatggtatcatttattgtttcaaattaatagggtaattgtaaatatgataagtttatcgaagatattacagaagtatacattttaagacaaccctagaaataattcttttaagagcatgttacaattattattttaaaatgcattactcctaccctaattttagttggaagagatgtatgaaaattacaatgattgtactgcatagaatatgtcatttttgtttgattttttaattagcagtttaatttgtgcagtgtcgaatataagagataattctgataggtttgtcatcacagagtctctggcagttaacatgaatacaaaatattaaatgtattacttaccgcagtaaacggtcactagtcagtaggttgataattcgcatcttgtagaacactggccatgactgatggatttttatcctttcttattatgtatacgttttttttcattaatagtgttccccctccaagtcagtttttatattcaatcctagcacaaatgattttaaaaatgaaagagatgaaggagatcattagattctagcagaggaaaagttgtaatacaagttggtttagaaccaaagtgctttctaactttcccatttgtttgttttttgttttatgtttagacttggtattaaaaaatgaagatgtaaacaattcagttaggaaaccttcagagatattctgcactgaccttcattagagtttgtgtagtgcatgaccgtggtaatatcaaatggttgcgtaagtatctacaaggccctttttcaaaaaagccatcaagttgcatctctctaattattgcaaatatcttgtttactcctatttattcactacatcacttgaagtttcctcttgaatctgagcatgtcctgtaggtctaccttagaagaaaggaaaagtgctgtcttccacattgggtttcagctgggcttacagccaagtgtacattgcaatttgcaattatctccttttcctgcttgtgctggcaaagagagggaaaattttaaatatactctctgtgaaaagagtgtgagatcagaaaacagacagtattatgaatacttaatgtatttcctactcaggacaatttccagcacttttcttttgggatttaggcttctgtgtataatatccccttgaaaactgaagaagtacaagtctccttgcttgtaagcgactaaatggctgacattctggatgcatgttttcatagactattgtgttttgagtaaatataaatgggatcactggataaatggatttggaagagtaacgaaacaagaatagcatgggggaattatctcacaggaacattaaacttaaggggatttaactgtattcccattaagagaaaaagattaaaataaaatatgtacagccacgtgtcatttagtgacagggataccttttgagaactgcgtccttaggagatttctcatcatgtgagcatcatcatgaacagtcatgtgtttctgaacaaccggggtatgttccaagaaatgtgtcattaggcaattttgtcatagtgtaaatatcacagagggtacttaaacagacctagatggtatagccccctacacacttagactatatggtatatcctatttttcctaggctataaaaattttcagcatgttactgtagtgaatactgtgggtaaatgtaacacaatggaagtattaatatatctaagcatatctaaatatagaaaatgtaatgcattgtcctaaaatgttaggatagctatgacttcaccaggtgatagaaatttttcagttcccctataatctatggaatcaccatcatataggcagtgtgtccttgactgcaacgttatgtggcatatgactgtacatctatgtaagttgcatagaccattttagtctccatttcactctgtgagaatgtatcctaaacggtaaatgcaattaagttttaaaaacatgttgcaagcatacacaaaagcatagagtaattgtgcaaattattttaaagttttccaggccatagatgaaaaggtaaagttcattgcttaggtagccagggaaaaggagagtgatagaaacaatggcagtcttggggtagacagtgaaatactgagagcctttgacagtcattgaaaaagaattggagcccgttctccatgtcgtgcttatttcagattgcatgcctgtatcaaaacatctcatgtactccataaaaatacacacctactatgtacccacagaaatgaaaaattaattagaacaatgaacaaagaataatggatttatatgggtgtacataaatccaagtgtgtaatagtttatacacatggacttatcaagaatgataattctttatcattcatgataaatgaaacaatctttatcattctaaatcaatgaaactatcaagaatgatttagatgtacagaatttatagtgaggcatgaccattagaatctagccagaatatagcgtacaatttcactatattaacatattcttgaaattgtctattcatttggtttctactggatggtacaattagagatgaattagggagggacaagaaactagcatttactgggtctctaacatgtgccaaaggcgaatggcacctcaggaaggtgcagctgcctttacgtgacatagggaagaaaacatttagaaaatgatatttgatcttccttgagaaatacaaatagaacctatccagatggaggaaggcagtgagcaatagcatgtttgagaacatacttttgttctcacacatcatgtaccaaacacagaagaaaatgacgcatctaaaattttttttaaaactacgctgatgcttttttttcttcacaacacatttttatggttttttttttttttttttttttttgagacggagtctcactctgttgcccaggttggagtgcagtggcacaatctcagctcactgcaagctctgcctccagggttcatgccattctcctgcctcagcctcccgagtagctgggactacaggcacccgccacaacgcccggctaattttttgtatttttagtggagacggggtttcaccatgttagccaggatggtgtcgatctcctgacctcgtgatccgcctgcctcggcctcccaaagtgctgggattacaggtgtgagccaccacggccggcccatttttatgtcttttaagctccaagttttcttagctattttcatctgtcatatatagcctcaatatattgttgcctggcacatagtaggcatccaattaaaattaattgaatgcatgactgaaacaagagtttctcttcattatgattcttaatttaagcttaaatttagaaatcctcttcttatcatttttcttagtttaactcaacactaataagattgtcgtttctatcatattctgtgtctttccccatgatttccatagctctttgaattaggataatgacttttttattttattttattttatttatttatttattttgagatgtagtcttgctctgtcgcccaggctggagtgcagtggcgccatctcggctcactgcaacctccgccttccaggttcaagcgattctcctgcctcagcctgccgagtaactgggactacaggcacccaccaccacgcctggctaatttttgtatttttagtacagacagcgtttcaccatattggccaggctggtttcaaactcccgacattgtgatctgtccgcctcggcctcccaaagtgagccaccgcgccaggcctaggatcatgacttttataacctgtagcgagaaaagatgcaaatctttctcttattggtatgattctgctcaaactcagatacacaatctagagtcaagatgacaccgtaaaattattttttttaaaaaagaaagaagcctgggcatggtggctcacatctgtaatcccagcacttcgggaggctgaggtgtgtggatcacttgaggtcaggagttcgagaccagcctgaccaaaatggtgaaaccctgcctctactaaaaatacaaaaattacccaggcatggtggcagacacctgtaatcccagctacttgggaggctgaggcagaagactcacttgaacccgagaggtagtggttgcagtgagctgagatcataccactgcactccagcctgggcatcacagcgagtctcaaaaaaaaaaaaaaaaaaaagaaagaaataagaatacgaactgcaatcacatttccaggctgattgtaaaataggaacagcacacttgagccaaagcaaaggtttcaagaaggataaggtcaaatgcacagaatatgggacttagattgtcaagctgaggttaaagtcagtaattattggagagacctagggattccaactttagactaggagcatctaggctgtcataagtaagaagagagcaggggctttaaaacttggctgtcacaggtagcatttcttttccccttgaccctggggcacaggttgtccactcgcaaatgttttcgtgtcacctgacactcaccttctcttctcgccagtcttgcaggccacaccttactcctaccacatcttgccctaggttttccttttcttgcactgaaagttctcctaacttatgccatcctactggggaaaaaaataagtttctttttctccctgctacataactacattacaacacttaataatcccattcaggtccaaaatgcacatctttctctttgcaaatagttactatactttctttaaacattcttattacttattttgagaatgtttctattttctcagttttagcatttcatgagtctttgacagctgggtctcagagagaggccagttaggaattggacaatcgtcttaagcaggctctgggtttcctgtacttttctgtgcagtgcctgtgctgattaaactatgacctgcagtttttctttttacggagttcatagtggtcatttgaaatatgatgtggcattcagaaaaattactctttctcctgcagtttctgtgaatatattttacactgcagcaattgtcatacaaggcatataaggatttattcaaaaatttatcaacaatctgagatgcattggtaagaattacaatgaaaatattagttgttctttatatcactgcaaacaatagacaaatccttacatgcaagaaaacttgctatgatgtttcaatattgtaatttcagccaatctaaggctaaggttctccaaagtttaaatatggtatttttttttccttttagaaaatccccatacatttaatagcccagttataaacatactgcccatgtaggtctcctttacttgtgacctctagctgtgagagaatccttaggttccagagaccagtagttcactgtgtgctaaaggacatgctttagctactcctttgctactccttttgaattctttctccttttctaagtgggcagctctcacccgctcattctctgggctttgcatttagaatgattggtcttccccactattattttagacaattacatttatcatgagaaattaatccttgagggatcaatgatgcgtgcttttctctggctcacaggaacaaaactattattcattttccacttgacataaagtgacccgtgaacccatttacattttcattcccctgctggcagtaccagtgaagccctttgtcagttatcagctagtagtgacccctgcaggcacagccaccactcagcccagggaggactgcttccggggcaggtcccctaggtgccaataaagaatgcaaccattagcccacatgtagggacctaaataacgctggtcagggtcttgggtctacctatgtgaagcaaacaggcaaatattaacaattttgctgtgacctgtatttgagtgataaaggtgtaattcgaagtgaagaactatgagagctggggcatttgtcattggaacttttccattttctctctaagggtaactttctttcatttttacaccctctaccctgaaagttgtcttcagtcttcagtcactgcccctgtattccatgccattatattatgtcatatattggtgactcctgtccctggaaaatttaatgagaaatgggaacgaaaataatatcgtcatggtggaatgacaggcggctgatattgttgagctagggaatgcttgcaatgctgagcacagccacatgtgccagaaatagggaaatgtatgacacaagacacagtcttgaggtgctcatgagctattaggaagttgcagcatgatctcaccatctgaaaatgaaaaatgaatcattctctggggaatgagctaaatttgactcctgaaatcaccatggtgccagggattacggtctctgaatgtgctacagacttggagtgactaatgagctgcttgaggtcatagagagacttaggcaattaaagacaattaatgcacattatcttgcttaaaacatagaaaatgatactccagttacgcagtggttacttttgtgacctgtttagataactctaaacaccatatttctcctagattttataatcttgttgttcattcagtataatttgttttctaacataaacttgatctttactgttgtgagattcttgagaacagagacactgtatgttatttcttctttatattcccagtgcattaagagcttccaaaacagtagatttttgctaaataagataactgttgaacaaatgaaagaatgagcaactgtagagctgtgttttgtgcattttctttaacacagtctatttttactgctgccgatctttactgttgctgatcaacctgagttgagttcatatttgagtgcaaaattcttcttctgactaagtaaggaatacttgagatgatgcaggattgaaggttcctaagtttatcagtaagggagtaagggagtcagcatattttaacccactttgggtaaaatatgacattgaactaagagacaaaaaactacaatgaaattagttaacatagtttttttgtttgtttgtttgtttgttttttgagacagagtctcgctctgtttccgaggctggagtgcagtggcacgatcttgactcactgcaacctccacctcctgggttcaagcgattctccttcctcagactcctgagtagctgggattacaggcaggcgccaccacatccagctaatttttgtatttttagtagagacagggttttgccatgttggccaggctggtctcgaacccctgacctcacgtgatccacctgcttcggcctcccaaagtgctggcattacagcatgagccatcgcgcctggccaacattatagaattttaaattaaggacatctgaaagataattgagttcaacatttcacattcaccctagactgctctcccaagatcaggagctactggagattttgaaggaaaacaggcctattcctaaaatgtaaaaagtgagcatgaaaattgcatctgatgatgacattcaggagaaacagttagtgtgcctatgcaaggtgatccgtgtgggacagagccaggactattacgaagcacttgatacctcaccacggaggactgatgagaaaattcattataaagagtttggctaccgcgaaatgtaagttgacttctaaataaagaattcaaatgaaataaaaatgatcgacaaaagttgactagaagttctctaaaatatatctatttctaattttatttcatttgataattacctaaattactctgaatcctaccttcaattttacttgtctttgtttgaacagtaattcttttgtctcaaatgtcatgtatctttgcttaatgccatgaaatttagccagtcttaaaaatctttgatagaggaaagaaaaatgtcctaaacatgtgttatttattttacttcctgagtctcaaaatgtgttttcatattgtgcttcaagtgtcatggtttagtttttgccttactcatttttaatatatctcatttaatagattaatattatattcccttgtaacctgcttatttcaagaataaaacacaatgtcttaaatagtaacacaattaattcagatttttttgacagcacgatgtatagtgcctaaatatattcagccagatttaaaacagggcataataagtaaaaaaaaacaaaatttcatagtgttgaaaaatcgatttggtgtttaatatttatttagatttataaaaattgtttcatattgtcccttgttatcactaagcaattaaagcattgctatctgagtagaactgccttggatattgtgtagcttatgaagtttaaatggctcaacactgtaggattctgatttgcaaagaaacagtctgaaagctcatcttcccaggctggaagacactggtttatttatttcactgtattaggcaagacaggatgatttttttttttatgttgagtggatgccttttggaagattagaaaactctgaggaagagggttctgaacaacaagccatctcaatttactgatcaccagcagtggaggcaaaaaatgagaaaatccatgagtttcctcttgatctattaaagtcctatttgtgatccaaatcagaattggaaactttcttcatagccttagtccactgtttctgaattaaaatcacttcatcatggtgttattttgaatactgtgatcttaattaagatccaaaccttagtgaacatttggaaaacaatagaatttgctgcaaagtgttacaaaaacatgcaaaatttctaatcattgtcacttactaatgaagtttatgtttctgtaaaagaatagcctgtaactaagtattctttggggttgtctttaaaactgatttgtttaaatttaaattcccagatgtcttaatagaagacagtaaagtcctaaaacaaaggtattcactgtgttcagctccttaacaccaagtacagatcaatttgttagctgcagtgttggatatcttccagcactaaaactgacaaggtgatattaagataaaatatattacctcctttcagtgttaagatatcttaaacctggaactggactcagaggaacaatttatgtagaaatggttttccatgagtgtagaaatagtttggggcaaatgttaaatttttgaacaaatgtttcctgaatctcctttttatgtacagcaggggttcacaaactctttctgcaaaggaccagatacaagtattgtaggctttatcggtcagccaaacgatgtcagtttctgtctctatattcaaatctgcccttgtggcatgaaagcagccatggacaatacctaagcagatagtcatggctgactgttccaaaaaaaaatgttatttactaaaacaggtgactggccagagttgaccaacccctaatgtagaacattgtgttgagaatcgtttaggaaatgaatttataaaaaaaacaaaacaaaacaaaacaaaaaacagtgctactcccctcctggagcttatcatatgatataaatcaaagaagcttatgcataaatacttaaataataagtaaaacttgaaatgtacaagagaagaaggtgcatgataagagtcatgtaagaacggcaggaaggtggggtccatgtgtacagaggagagggggtgcaatcatttaaaactaaggaagaattgcaggcactcaaagctgtcaagcagtaccctgatggatggagactgccctgtagagaagagagcataatggaaccctgggagagccatgttctttccacccatctcacagtctttgggctgctttgttcttctctaaatgcagagtaactattcatatcactgtcttatagaggaggatgctaggaaccagtgttggacaaattagcagagtcagaactcacattgggtttttcttacttcaaatccctcaggattttgcacaatacattcttgcaggtcattcaggcaaggtgtattaaattgcatttttcttgaatggcgtacactctagcctaactaaacatgggtattttgttgtactaaataggagtaaaggttgaaaattttgggtacaagcagaagttggatggttttgaatgcaaagatgtttgaagtttaggtgggaaatagaagaggacccttaaaagttttaaattatagaataagataattaaaatgatgatttatagagaggtgaatctgctgaaatatccaggctatagaaaaccgttatgtagtgcttgactaaactttattcagagggataatgactaagaattagacacatcatggaaacaggtatgtgaggggtcgcacacttttgagtacaacaggtgtcatttgcaggaatatacacatgaccatggttttgagaaaccttacgctagactagcaagaacttcaatcttccaggtatctcctctaaaatatcattatggttgttcagaggtaacccttggcatcagttctgactctctcatgttctgcttctcttagtgaagtggaagtggatgtcacctttgtggctggacaccacaatttctgctccccatagagctccacagtggtgctccttgagcctctctagttgggtctaataatggaaacgtaaattatttgggattgtcattgtctctgtacgcaacttctactttaagccttatcagtctcactcttactccttctggtcttagtgtaacatgcacagagatgaacaggaagaagtattctggtagcatgattgggaaaattgtctactcatctgtgtatgctttatgaaaggcacaaactctctgagcccaaagggttatcacccatgcctgtacaatatttcccacttagacacacactcttacatgaaaattcatgtataaaatggaattctcctgccagggagcattcactgtgcccaagagctcaggctgtgcccagaaccagctgccgcctttgacgtaggccttagtgtggaaggtgattcaccagtttactcttttaatatctgcaatctggcctccatttagggctgctcaatccaccagatgaatatttatatctttgagctactattgagggtttcatccccagccatttctcctacagacaaatgattcttaggttcctgtgttacacagtatgagcaagtatatatggaggatggggaatgacgaacacaagcatccaattcacaatgcaaatgtactcaggaaaagatgatgcttgattattcattagcagggtttgagcttcagatcaaccagaccatatatcatagcagaaaaaccttttctgtactcctgcctcagcaatatctggattcaatatctagttcagcctaaatctattgtatactaaatagtgtaaaagaggtatttaatagataatttttaaaaagcaaaaccatgatcacacaacgcatggtagccccaaattgtaatttcttggaggtgggacacaggcagccaaaaggaagtgaagcacttggtagaatgtacatgaaacggtgcacagtagttgatgctgcttgggtgaaaggaaggggaaaaatctattgatcacagaagatcaatgtttagtgatctggttttgtgtgtcagataccttactaaacgtttttacattggacctcatttaatcttcatgataggcctatgtgtaacaaattgttgaataacttaaagatgtcaggtggaaaatatgatttcatttgttctttaataatttttattgatgtagactttagtaacattattacatattatgttcatatgcatgtaacctatatatttcctttcaaacaaaactatattcttgaaataaaagttaatactaatcctgtgaagaaagtcattggtagcttgatggggatggcattgaatctataaattaccttgggcagtacggccattttcacgatattgattcttcctacccatgagcatggaatgttcttccatttctttgtatcctgttttatttcattgagaagtggtttgtagttctccttgaagaggtccttcacatcccttgtaagttggattcctaggtattttattctctttgaagcaattgtgaatgggagttcacacatgatttggctctctgtttgtctgctattggtgtataagaaagcttgtgatttttgtacattgattttgtatcctgagactttgctgaagttgcttatcagcttaaggagattttaggctgagacaatggggttttctagatatactatcatgtcatctgcaaacagggacaatttaacttcctcttttcctaattgaataccctttatttccttctcctgcctaattgccctggccagaacttccaacactatgttgaataggagtggtgagagagggcatccctgtcttgtgccagttttcaaagggagtgcttccagtttttgcgcattcagtatgatattggctgtgggtttgtcatagatagctcttattattttgaaatacgtcccatcaatacctaatttattgagagtttttagcatgaagcggtgttgaattttgtcaaaggccttttctgcatctattgagataatcatgtgttttttgtctttggttctgtttatatgctggattacatttattgatttgcatatattgaaccagccttgcatcccagggatgaagcccacttgatcatggtggataagctttttgatgtgctgctggattcggtttgccagtattttattgcggatttttgcatcaatgttcatcaaggatattggtctaaaattctctttttttgttgtgtctctgcctggctttggtatcaggataatgctggcctcataaaatgagttagggaggattccctctttttctattgattggaatagtttcagaaggaatggtaccagttcctccttgtacctctggtagaattcggctgtgaatccatctggtcctggactctttttggttggtaagctattgattattgccacaatttcagagcctgttattggtctattcggagattcaacttcttcctggattagtcttgggagggtgtatgtgtcgaggaatttatccatttcttctagattttctagtttatttgcatagaggtgtttgtagtattctctgatggtagtttgtatttctgtgggatcggtggtgatatcccctttatcattttttattgtgtctatttaattcttctctcttttcttctttattagtcttgctagcagtctatcaattttgttgatcctttcaaaaaaccagttcctggattcattaattttttgaagggttttttgtgtctctatttccttcagttctgctctgattttagttatttcttgccttctgctagcttttgaatgtgtttgctcttgcttttctagttcttttaattgtgatgttagggtgtcaattttggatctttcctgctttctcttgtgggcatttagtgctataaatttccctctacacactgctttgaatgcgtcccagagattctggtatgttctgtctttgttctcgttggtttcaaagaacatctttatttctgccttcatttcgttatgtacccagtagtcattcaggagcaggttgttcagtttccatgtagttgagcggttttgagtgagtttcttaatcctgagttctagtttgattgcactgtggtctgagagacagtttgttataatgtctgatcttttacatttgctgaggagaactttacttccaactatgtggtcaattttggaataggtgtggtgtggtgctgaaaaaaatgtatattctgttgatttggggtggagaggtctgtagatgtctattaggtccgcttggtgcagagctgagttcaattcctgggtatccttgttaactttctgtcttgttgatctgtctaatgttgacagtggggtgttaaagtctcccattattattgtgtgggagtctaagtctctttgtagatcactcaggacttgctttatgaatctgggtgctcttgtattgggtgcatatatatttaggatagttagctcttcttgttgaattaatccctttaccattatgtaatggccttctttgtctcttttgatttttgttggtttaaagtctgttttatcagagactaggattgcaacccctgccttttttttggtttccatttgcttggtagatcttcctccatccttttattttgagcctatgtgtgtttactttaaagttcatatggcaccaaaaaagagcctgcatcgccaagtcaatcctaagccaaaagaacacagctggaggtatcacgctacctgacttcaaactatactacaaggctacagtaatcaaaacagcatggtactggtaccaaaacagagatatagatcaatggaacagaacagagccctcagaaataatgccgcatatctacaactatctgatctttgacaaacttcacaaaaacaaacaatggggaaaggattccctatttaataaatggtgctgggaaaactggctagccatatgtagaaagctgaaactggatcccttccttacaccttatacaaaaattaattcaagatggattaaagacttaaacaatagacctaaaaccataaaaaccctagaagaaaacctagacattaccattcaggacataggcatgggcaaggacttcatgtccaaaacaccaaaagcaatggcaacaaaagacaaaattgacaaatgggatctaattaaaccaaagagcttctgcacagcaaaagaaactaccatcagagtgaacaggcaacctacaaaatcggagaaaattttcacaacctactcatctgacaaagggctactatccagaatctacaatgaactcaaacaaatttacaagaaaaaaacaaacaaccccatcaaaaagtgggcaaaggacatgaacagacacttctcaaaagaagacatttatgcagccaaaaaatacatgaaaaaatgctcaccatcactgtccattagagaaatgcaaatcaaaaccacagtgagataccatcccacaccagttagaatggcaatcaataaaaagtcaggaaacaacaggtgctggagaggatgtggagaaataggaacacttttacactgttggtgggactgtaaactagttcaaccattgtggaagtcagtgtggcgattcctcagggatctagaactagaaataccatttgacccagccatcctattactgggtatatacccaaaggactgtaaatcatgctgctataaaaacacatgcacacgtatgtttattgcggcactattcacaaaatcaaagacttggaaccaacccaaatgtccaacaatgatagactggattaagaaaatgtggcacatatacaccatggaatactatgcagccataaaaaatgatgcgttcatgtcctttgtagggacatggatgaaattggaaatcatcattctcggtaaactatagcaataacaaaaaaccaaacactgcatattctcactcataggcaggaattgaacaatgagaacacatggacacaggaaggggaacatcacactctgcagactgttgtggggttggagggggagggatagctttaggagatatacctaatgctaaatgacaagttaatgggtgcagcacaccagcatggcacatgtatacatatgtaactaacctgcacattggtcacatgtaccctaaaacttaaagtataattaaaaaaaaagttaatactaaagaaagtcttttttccctaaaatattattgtacaaagagagaactcttaataaatgttgacctctgacagaagcttaatttatcctaaagcatttattaaacatctattgtgtactaaaaattggaaaggctttcttttgaggaaaaaataaaaaggcactatatttgttctcaaacactagcgatatgaataataggtgtctatatctgagaaaaatgcagaggaaatagaagggttatctaagtctatttgggctcgtatagcaaaattccttagaggtggatagcttatcaacaataacaaaaatgaatgtctcacagttctggaagctgggaagtccaaactcaggttgccagcgtagtcaggttctgctgaagaggcttttctagggagggtcctctggtgagggtccttttctgtgcagattgccaactccctgttgcatcctcatatgggagaagtggagaggggtcactctctggcctactataaaaaggcactcattccattcatgagaactctgcctgcccttgtgacttaatcacttcccataagaccccacctgctaatacccccacctgctaatacccatcatggagttttgaactacaatatatgaattttgcattcagaccataataaagagtatatttattgcttatctaacgctctgttttaatcctaagaaatttatatcacgcatctacttcgatgctatagctagactaatacatgttcatcttcgtgcattttcccatatatgctattttacttccatctgtacttgaattttcttagtggcttgggtaaagccttgacatgtacacttgttaaaatggcctcttgatgactgacaagataaccagctacaattaatggtcattgtaatgttgagggggaaaatcatccttgaagatgattagatactaaatgaattagcacacagcatatttaaacacaagtatcaagtcaacaaatatgattttatcaatctttaataattttactaacctttattaatgtatattctagtaatgatactatatactatgtacatatacaggtagcctagtatttcatttaaaataaaattgtattcttgaaattaaaatcaatacagaggaaagcttatttctctgaaatatttacaaaatgcacaaatttttaaatttcaaaatttaacatttgtgttttattttaatgaatacaattttcaagtatgttatatgtacagaatggaatacatagcacaaaagaattatttactatctgtgtatgaacctaaactgcatcaatgaccatataaagcaggtaatataatttaaaataaacaataatgatgtaacaaattttttcatatataaaatgaaaattttggagattaacactgcgtctgcctttgtgggtgatttattccacagagctctttcaattgtttagctgccttgaatcttgtagcttagttataaagagaagtttggaggtaaatgttctgcagcattcaaaaggcttccttgaaagccatttaatgcttgaaaaccttttattaatgtatttgaaaatagtcatgttggattggaatatgagagaaaaactgatttggttgattttcctggctcatcagttttgaggttattgtaactaacacacctcagtcagaggcactaatgaattaaacacacagtgtttgattctgtgctgtctaataccatagcaactggtcacatgtggctatttaaattagaaattcacattaaagtaaaaattcagtttctcagtcacactggttatgtttcgtttctctctctctcttttttaaaggaagttttgctcttgtttctcaggctggagtgcaatggcacgatcccagctcactgcaacatctgcctcccaggttcaagtgattctcctgcctccgcctccttagtagctggaattataggcacgtgctgacatgcccagctaattttgtaattttagtagagacagggtttcaccatgttgaccaggctggtctccaactcctgacctcaggtgatccacccgcctcagcctcccaaagtgctgagattacaggcgtgagccaccgcgcctggcccacactggttatatttcaagcactcaatagatacacatggtttgtggcaactaatggacagtgcagatgtagatggaacagatccattcacactgaaagtactattagccagtattattgtaagatgtacgataacctcctttgcaattttatttagtcaaaagatagtaaatgcagtgtaaagtcattagagaaatattgacttttaaggataattaaaaaccattaggataataaacctatgttaaggttattcctgattaaatcaataccatcatgagacatattccaaagatccactgtgagatgctttatggaaactctaatttctaactaaaaaggcatgatatgtgaacactcatagcttaataaaaattatagttaatatgaatggcagcctgtcatcataaacatggttagtaaatttcctggtatccctctcatattcttcccaattggcatcattcatgaagtttctgtgtgattagttccaactggatttccaaggtgatcccccttttctaaaagaaataatcataatctcttccctttgccacaatgatgacttcatgaatatgaattgagctcaggccccagtcctaccatgaattacattcctcctatgatgccgcttgattcaagggtgtacaagagcttcataaggtcaaaacaaagtgaagtccagcagttttgctttaggatgagggagatagattctcacttttaccggatgctggggtgtgtggactgatacccagaataatcatagttatgttgttgccctgaaaggtgctagcctgaagatgaagacatatagaggacaggggatgagaacatcacacactatcactaaaaatcagttacttgggctgggcagggaggctgaggtgggtggattacctgaggtcaggagttcaagaccagcctggccaacatggtgaaaccccatctctactaaaaattagccaggtgtggtggagggcacctttaatctcagctactcaggaggctgaggcaggagaatcacttgaacctgggaagaggaggttgcagtgagccgagatcatgccattgcactccagcctgggcgacaagagcaaaactccgtcttaaaaaaaaataaaaaataaaaaaataaaaaataaagtcagttacttatttacctttaactatagatgtcaaatttagagttagattttctgttatgtaaagtcaaaattattctgaaactcttaggtatgtgacgacttgtaggcaaagttatctctccaaattggaaattagtaatcttatttaaatagagtcttcacatttagtaaaagcatattgatgttggtacatttaaattgcaaaataaaagaatgacttactctttagaagcaagaataggactgggcacagtggctcacacctgtaatcccagcattttgggaggctgaggagggtggataacttgaactcagtggtttgagaccagcctggccaacatggtgaaatcccatctctactaaaaatacaaaaattagccaggtatggtagcagatacccgtaatcccagctacctggatgagaatcactttaacccaggaggcagaggttgcagtgagcagagattgtctgggtgacagagagagactctatctaaaaaaacaaaacaaagcaaaacaagaatagacagtatattcaccaggtatacgtatattaacttctattaatttaatattttcgcaaatagttgtttgaagtctctggtttaggatagaacagaagtacatattttgggtgatatctgaaaaatggactctgaagggagcacaaggagagagaatccagagtgaataagacagtagctcacggctgggcgcgttggctcatgcctgtaatcccagcagtttgggaggccgaggtggatggatcacctgaagtcaggagttcgagaccaccctggccaacatggcaaaaccccgtctctactaaaaatacaaaaataagctgggcatggtggcaggcacctgtagtcccagatactcaggaggctgaggcaggagaatcgcttgaacctggcagacagaggttaaagtgagccaagatcatgccactgcactccagcctaggcaacagagtgagactctgtctaagaaaaaataataataaacaaaaaaaatagtggctcatgtttcacaggcgcgtaatccacatcactgctgtgcattctgagagtgcaggcgtgaagtatagtcagttcgggattgtaatcagggtccttaactgaaagatctaagggaaactaagatgttttacccctcccaccctagacacacagacaataacagcggtgataaatttcaagatgaaatcacagatgtgctcctccatctcccattctcaaaattaggaaggctttattttgaggtgccagagcacacattaggggacatacaccttcctaggtagacatttcagatattttagagagcatgtgaattaagaacttgaagtcccaaaatagtgtttaaagacatatggtaactagcagaggcatgaaaacgctatttttatcagcaaatcccagggaaggatggggagacagatgatcctgtaagggagctaaatttcttacctttcatggcatagagtcaaccacttaaagtctaatgatgatgagcgaagaaaccggtatgtaattattgaggcatcattgtggacacaaccaggaaaataaaatctgaaaacaggagcccttaaaatacaatttgaaatatggtgtcaagtttgttggagatttgttaattcaagtggtgagttaacctaaaaatatcacagaggccaggtgtgaggtaaaaacacaaactgttttcctgcttctctcgcactacaacagtgggcacagaaggcgtctgtgtgtgggactttctctccatgtaccaagtaagcaaccagttctgcagtggacacaagctgactgtcctccagcccagttgcattctgaccctgtctatctggagagagcctcagatcccacagggtgagggctccatcccacaggcctgccctccacttcccatgccagttgcaagccccaggctcttttacctgtgcttctgactgaccagctgtaagtcagggatcccaccacctcctccttgggtttgattaatttgctagagtggcttacagaactcagggaaagacttatttacattttccagtttattatgaaagatatgacaaaggatacagatgaagagatgtctagggtgaggtatgcaggaaggggcctgaagcttccatgccctctttggggacatcaccctctaggaacctccatgtgttcagctgtccagaagctcttcgaaccctgtcctcttggaccttttatggagattgcattggacaggcatgattgaagcatggagaaatgtcattacacaagaagggtaaggtatagtcctcatagactgggtagcgaaacccggcaaagcctgtctgttctgtctgctctgtcgattcttcttggcctcgctgtgcagtattcttctctcccaggaatggggcaggactcctggaatgggggcctatgaacaacaatcagacaagcagatcagagaatttctttgtagccccctccaggacagaaaggcggaggaagattcctgccctggggagaaaaatgagtggataaaaggaagggaggagaaaggcagagagagtctgttttctgaggtttgctcctgaggtctaaagaaccccaacgttataacaaaggccacaggagttagagccagaacataaatgaaaatacatatataaaaaacataaaataataatgaaaaagggaggaggctactattgtttatgactcaatgtaaaacttgcagagagaaatgagtgaagaataatacttcaatcattcttctgtcttggtgttcacaacatagagacacacacacatatacacacagaatcagaatcagaatgaaggagacataaagataccatatgtgcatagatggacttcctgtaagaatgaatagagaaggaaaggaatagaaatgtaagagaatacaaacagttattccagtagagaatgaaacgatataattattgagtgatcgttcatggagtggttttggaagactctcaggaggagtctcctgtccttgatggcctattagccctttttgccacatgtgaaccctaacactctgaaggtgaaagataataacagacagtgttgagaccagagctaaaattgttgaacacataatcatgacagggtaaattaactatttcactttatcaaatgttttaataaactcttaaataatatgcattgaaaaactggcatttgatgtggaacattctcttagatactatattttataatttttaaatttatgtatgtatttattttggtgagcaactgaaaactgcaattgtcagtgaacttccaagtgaaatgcctttgcgctgtctgagttttagatcttcaaaagctcaaatgagtaatcctgtcaaattacatgggttgatatggaagagagataagtaaataaaactccactataatatttgtgtggtaccacacacatttggcttaaaaataaaaagggattgaagactgtgtaaagaaatggaattttttaaaagataagataggagtaaatatagaaaaggtcttaaatgacttcaggcagtgaagcaaaaagcacattcccttgtttcttcctgtagaatgataccctagaccaggctattagctgtggataggagccctttatagttcagcaaactattaatttatagtttaccctttcagctaagacattgaagctattctttaaaaatttgagataatttgactatttaaaaattcaactacctttgcaaaatcaaaacagatctgttttgtaagaggtttgccatttcagcatctcactgcaagtgataaggtggttcagtgtttaaccaaagatcatggccacttgacccggtcttcaacccagcgctgtgccaggctgcacatggagggcaccagctgagtatcaccagccaaaggactctttcaaatgacaccagaaaagcctgtcctgttcagaaaaatgacatttccaggagttggaataatgctaaactacatggtctgtaaagtttcctctaagtaatatctaaggcactgtgagtctagccttgggaacatatttgtcaaaagactatttaagaaggggagatttttcagtcctcattgtgttctctctctccctctctctagttaaatgtatatattcatcaggtatttgaactcattttgctaaacatgggacacagaattaataggcattaatattttgtccaaatttagataataagatcatatatatataatatatatatttaactctcctcttgctactttactaaatatatatttattaatagaaatgagtattacatgttaatctctgaagatcccaaaataaataagaaagtgtccagcctttcaagtagctctcagtgcattggggaaaatgaatgagaaaagtaagttctactgtagtattaaagcaagagtgtgaataaaattttgttacagttaaacacagagcacttttaaaagtttgagattttgagtaaggttaatttatggtttagctatacctcctgtggaagttctgaagatcttattgattttctacatttggacaaaacattaatgcctattaattctgagtcccatgtttagcaaagtgagtccaaacacctgagaatcaagtgactttcccccagtattgattttgttagtggtaacaatttgaagatctccttaactcttctgttctcccagttgtctttactctaaatgttgccctgtgtatttaaaacctctaaaatccacattccttcccatagcctgttccctttctacttccctggcctcgtcttatactgtgtatgatagccacactggccgccttctatttttacaaagattgctgtctcttttatacttgatgtttccctcttcctagaatactactccctccaatctttatatggctggctccttcttattatccagatcgcatctcaaattgtctccacagagagtgctttattgatactcaaactaaataacaacacccttgccccacaattacatttcattccatgtttttccattattacaatttaaggtttcacagcctttgtgtctgtaattattttatttgtttatcatctggtttcctctaattgaaataggtccgtgaaagcagagtgtgatctctccaatcctgtatctccaacactatgagcagtgttgagccataagtccaaaaaaatgtttgttgaaggaagaaatacttctagttcccacaaattatgcaaagggtaaagtaaaatctgtctaaatattatgagggcaccaagagggttacatttgtaaaaagaagaaataataactatgtaagctgaaaactctgtattactgactccttataagaggactataaaagagaagagtaaaatataaatcagatgatgaaggtataatattttcacatgttttgttaatatttagtttaacctaagtcatgttaggttggtgcaaaataagtgtggctttgacattacttttaatggctaaactgcaattacttttgcaccaacctgataaatgtaacctttttccaggtggatgtcctagttggttagtgatgctttttccattagatttgaagtcattgacgttgtccaggaaaagaaaagagcccaggacagagtttttggaggatatgaacaggcagaggaggatgaaaatgaaaagccagaaagattaataggaaatcaggtggatagggggatgtggtaatgttggtgggggttacctatgtagttctagtaaagaaaccaaaaggcaaaacagaatgtcagaagggggcaagtgatcaacactattaatgctatgaaaaagctaatacaggtaaggactgagctgtatgtgtcggtgaaactcaagctgctgtaacacataagtccttgattgacaatggtttgcccagtggaaggttgattctcaggagcagaacagtccaggtaatcttggttggcagggagctttgtaataattggagaccaggtgtggaatctgtttttgagtggctataacaggatacccaacactgggtaatttataatgaaaagagatttaatgggctctgcagactgtacaggaagtgtggtacaaacatctgtttctgctgatgtcctcaagtagtttccagtcatggcagaaggggaaggagaaacagatgtgtcacgtggcaagagaggaagcaaggtgggaggtgccatgctctttgaaacaaccagatctagcatgaactgacctatcaccaaggcaactgcgctaaactattcatgatcccttgtaatccaaacacctaccaccaggccccgcctccaacacggaattacatttccacatgagattctgaggagacaaacatcaaaattatatcatcgggttccttccttcttttggcctcactctattttagggttccagagtcccctacattcagctactgagtgtggaaaacagacaagagaagtcacaactgctttttctaccccttagcctagaaattatacacatcacttctactcatattccctaggcacaaggtcccatggttatgcaaaggagccaaaaaatgtagttggtagaagcagctatttcttggatatagatttatattatggaaggagaagcagaaataatgatgggcagtgacccatcttctgtgatactttagaaatttgtgcaactaagtcatttttcacttcataaatattgattgatctcctaaaaatataggactacatggtaatttgtgtctgctcccaaagagttataacttattggaagaaataagatttacaaatgaattatggtaattcaaagatatttctgatttattcgtgtaaattttgggatagaaaaatagatgagaacagtagaaaacaagtacatgtgtattactaacccagcaaaaatataaaccctttttactgctacattttgccattttcagaataaacttgcataaattctcctcattcttagctcaaactgtgctgctgattggattgaactacttgtatatgaatgtatcttggtgtgatacgtagcccattaaaaacctagtatggatttcttaactaaaatcctgtattcctaatttacgttgatttccatttttttaatctcaaagtaatatttcagttttattattgggtaaacaatgtgtattctggcttagaacactttaaagttatttcagaagaggtcacaggggaagaaagatccagaaaagtggaatattttcatgaatcattaagttaataactttggaggaggaaggtatgtctagaaaaggcttaaaacaaaacgattagacttactttaaatatttttatttcaaattaagtagatgaagatggtataaatcaggagttagcaaaccttatattgaaaagggccggacagtgaatactttaggatttgcagaacgcatataatcttcgtcacaaatattcaattctgccattacagcatgaaagcagacatcagagacagggcaaaagcataaaccagcgagtgttaatgtatttcaatagaagtttattaattgacactggactttgaatttcatacaattttcctacattatataacattattctttctttgattttccctcaccatttaaacatgtaaatggaccatgcaaaaacaggtggtgggctggtttggcccataggctataacccctggtatatagagccattaacataaaaatacaatttaaagctaatttagaaaattttacccaaagctgtgtaaattataacacattaattattatattctacatactcatttagggtggaactttataaaatatcttttaaaaatatataatatataagatcatgttatgtactacaaaattttaacacaaacattaacaccccattctttgtgtttttttgagaagtttttgttgttacttacacgaatgaagctataggaaattatcctaggtcagttcaacagaggagacattttcagtcttgctcatgtttagcactctttgaaagtcttgatgctcaattagtcaattagtagccgccagatggagaagggtatttcttcacaggaacacgtgttgctatgtgtgtgattaagagggtgaaagatgctgttgtgtgtcagacctctctgtgttccttttagatgtcactagctcaatcaccaagggcaatggaccataagatacttatgtatcttctgcttggcttcatgcttgatgcctctgatcagactcagtgtttcatttccagtatcacagatgacagagtaaaatgcaaaatgtgttgctgcacatgtcaaaaggtccagagaagaaaagacagctctacttttgcatttggattaacagcaattgaaaataaatgcccatttccaattctttgatattgtttaaatttatatgtttgatatctgtttgttattatctacacgtatccagggattatttgcctaagctgcaaaattggaaaaaaaagtacagatttagaaaatatgctgccaatggcttaattcagattcattgttaaaccacaatattaaagtacactgttaacataatgtacactgatagttttgtttgataattacctacttgaaatagtagactgataaattgtcccaattggagaagaccttcaaccatctatgccaaccttctagactgcaattattaattaatcatttctggaacaaaagctcctaaaaatggcttttaaaattgtgttttctgctgaaagattctgctgaatggaagtgggagtgtgaagcctaggaaagaatatattcatttcatgtttttgattagctctgaaattttatttaccctcttacctagaggaagagtgccagtgtatattccctaatcctctgctcaggaaattcaacactttctgcaatttgtacttgaaaaaaggtacacaattttagaaaacatagacaaaaaaaacagaacaaaaccaaacaaaaggcaattattgatgtgaagcaaaaagtattaatgcactaaagagttgcttcaggatgcctcccttgccccatcgctacacacaactaccctacaaacgccaagattcaaatgtgatactctcttccatattacatttgaatcttctttttccaggaaaagcagagtatgtatgggtgtacccatagtaagcatgagggcttccattgtttttccatttggcgagttgaaaaacaagtgtgctgcattctcctgtctgttacggtacagatatcttcattggagcactatttgtgaagcacacagttttcaagtcttctagagcaaatttgtttgtcaccatcagaagggctggaaataaaaatatgtttgcaattgacatagtgcaggaactggttaacagcttcaaagaatttataaagaatatttgtctctgaaatgttataaatacccatggtgaaaaagacctacttagaagatgttttctttaatattcattgtgttttaccaaatacagtgaggatatatgagcaattagaaacatgtgcctgcaggttggctcttgctttctttgcagacctactgcccttcttgttcttcctctccatcattttcattgccttgttaagatttatctggccaggcgcggtggctcatgcctgtaatcccagcactttgggaggctgaggtgggtggctcaactgaggtcgggagttcgagaccagcctgatcaacatgaagaaaccccatctctactaaaaatacaaaattagtcgggtgtggtgggacacgcctgtaatcccagctactcgggaggctgaggcaggagaattgcttgaatcctggaggctgaggttgtggtgagccaagattgtgccactgcaatccagcctgggcaacaagagcaaaaccccatctcaaaaaaaaaaaaaaaaaaaagatttcttaacctgcttttccctccgttgcttttgcctgtttccctttcctagttttcactttatttttttttctctctcctattctgttttttattctttgttccactttatattctcccttggtgtgaagaatggctgcagttttagtcatggctataagacaatgtcattttagagagctaatgtgtcctgtcattgaaaggatgagatgataacagaagtaagaggggctggtgtcctacatctccacggcaaggatttcgcccttctcccaatggtgtggttcattgaaatagctccacatcctcattaagtttatttttatagtatttctgtctctaatattttttccccatggaaagattaggttttctttttgagtccttctggctctcccattgtccctgtttgctggcagtggaaatgctataaatcagtattgaggtctggcaattttgcatgccgtcagctaaacataatgctgttgaaattcaagcacagttctttttaagtagacatttaattttagtagaatttgcatttgacagtttgaattcatgtgtttcagcatctgagtgaaatagccctctctgagttctaatggaatgaatttagtgaaattaaccttttgtcacaaaaacacactatcctaggcaaaagttttcacactgttttcagtcagttctatgtagttataatagaatgaatcttcctaatttaagtcatagaatgataaaagcagtgatgaaaagagaatgtacacctaggagtccttaattactctgtgaagtgccagcaataagtatgggacattgacgtgaaactccagttcattacatcaaaaaaaatattaatggtgagatgtctgacactgacaaaatacctagacataacaaagtgcttgtggaaaatgcttgaatttttttttttttttttttttttttttttgagacagtcttgctctgtctcccaggctgaagtgcagtggtgcagtctcggctcactgcaagctccgcctcctgggttcatgccattctcctgcctcagcctcccaagtagctgggactacaggcgcctgccaccatgcccggctaatttttttttgtatttttagtagagacggagtttcaccatgttagccaggatggtctcgatctcctgacctcgtgatccactcgccttggcctcccaaagtgctaggattacaggcgtaagccactgaatttttaaatttactcttaatatgtattcttgagctaattaatgagaaaattcaaacaatcatattcagtaaagttaaccatcaacacagtcgataagtttttcacaaatattctcccttttctttgaaataaagaaaccagatatagaaataagaagtttctattttaaatatttaatatttcttctggacaacattaaagctattaaacaatgccattggccaactatcaattgttaagtgtgtccaaaccctggcattcaatttttttccaagacacttaaacatttaaagtctgtttttaaaatcttaattatttttattaaaaaaggatttttttaagaaaaaatgattttttggtaacactttaggttgcaatttttttaattttaattttttttatttccataggttattgggaaacaggtggtatttggttacatgagtaacttctttagtggtgatttgtgagattttggtgcacccataacccaagtagtatacactgtactcaatatgtcgtcttttatccctcacccctctcccaccctttctccatgagtccctaaagtccgttgtgtcattctatgcctttgcattctcatagcttagctctcacttatgagagagaacatatgatgtttggttttccattcccgagttacttcacttagaagaatagtctccaatatcgtccaggttgctgtgaatgccattaattcattcctttttatggctgagcagtattccatcatatatatgtacaccgcagtttctttatccactcattgattaatggacatttgggttggttccatatttttgcaattgcaaattgtgatgctataaacatttttgtgcaagtatctttttcatttagtgactcatttacctctgggtagatgcctagtagtggaattgctggatcaaatggtagttctacttttaattattcaaggaatctcctcactgttttccacagtggttgtacttgtttacattcccgctagcagtgtagaagtgttccctcttcactccatccacgccaacatctatgattttttgattttttgattatggccattcttgtaggagtaggtggtattgctttgtggttttgatttgcgtttgatttgcatttccctaattattagtgatgttgagcattttttcatatatttgttggccatttatacgcctttgagaattgtttattgaccttagcccactctttgataggattgttcgtttttttctaggctgccactgttttaataaaatagtttttttcttttttactagatcattcttatgattcagttttactagcatttggcaattagcaattattgtatataaataaagttgtttcgttctctgaagaacctgcagagaaccctcgtctggagaaaaattctgtcaggtctaatatttgttaagttcttaacaaagaacctggaacacaggcaaagctcaataattttattaaattcaaactgcattcttgctggtgagcaaaaccagtgtctaaggacttacatgctacatagttctttgatgccaacattagatatagaatgattagcaaatacgttccaaaatgcttaattcttgtgaaaaatgtttcaaggtatacttgaggtattatccttttttgtaaaggccatttgagatgacaatttttgaactactttattttaaaagcatttattattaagaaattcattaattagtactcactgcaccctacttttagtcctgcataatgcacctgtatttttgtactaaaaggtaaatacaaataaatgaaaatgaaaatattgaactctaagtatgtcaggattcctatagacatttcacactctgagattatgcaaattatgataatcatgttaataaagatttggatgaattaattgttattcaaaatggattagtttgcaaaacttcaaattagtctaaaatggagagatttttctggcctcattctatcttcttcgcaggtctttgaagacagctgtgtagtatagttactgtgatgatattgtcacagaaataagttgaagcattttgtgtattttgtgtactaccaatgcctaaataactaactgaaaaatgtatatatattcatagaaagataccagggacaagtggaaagttacttaacaatgatgtgaactttgacatacttaaactctttcggtctcaaatttattgttcagtacaatggttaacaataaggtggttataactattttataatcatcctataacaattgagtgactgtaaaaatgaaataagataaactttcattaaagaacctagcatagtataatgacaggtacataaaagtcctcaagttttaattcttatccaaattcccgtaactctatttccaaggcctcaattttctcacgaaaggcctcttactttctgaaattctatgatttagtttttagttcaattaatattttagcaaatgagtaagttaatgaattaatatatttcctttagagtttactttctaatgcacatgctgttatggtcctatatgaggaaatgtcttttaatgtgcaatattaaaattcacggtcacataaaatgaataaagttttaatgtagaatataacatttttgaattctagaattcaacttaccagagaaagaaaatcttagaaaacctggttaaaatggcttttgataagcacattgaatataaaaacagggtatttatatatatatatggatatgttttctatcttattttcagatcgtaattagccactatataggttttgtccttcacagaggtagaaaaaatacatttaatcacttccaaaaatctgtttgagtcctgatagcctgatatcctttgaaatgcttaaactttgtatttggtatgattcgagatttcactaaattctctattgtccccacgaaaatgacttatttgggtagggggtatttcttatcttgttggaagctttataaaggatcagttattgtatctttgagctgatgaaatagtttaacactgctcaaaacttgtccaagatgctgatatgtatcttcagttagaccatttgaacacatgactaatacacagaccaaagagaacattgtttaaaagaaatcttatcaagaatcatgtaatagatcttaggctatttggatttcctcacaggaaaatagaagcaaaggcagtgacagcaatactcaaagtaggaattgagctctgctccatgtggataatgacaacatctgcatctgttgtgaacttgctcccaaatcggagccctgtgtttttcagcttcctgatgaacatttctactttgtactgcacaatcgcctcactgttaacattctgaaatccactcatttttcctctccatatttctttcttacacacctgttcttcttgtctgccagatgtttgctttatatcacaattgtcttttccccctaatcttggcaactcagcatcatctttgattctgttactgattgggtctgagatggagataagtatgcaggaggtttagcgtgtaggagcatgtaggggtgctcttgggatcactacctgtggaaaggaagggaaggaaagaaagaaggattgggaagagataaaacttgggatgcaatgtactcttaccaaagcctagagctgacctcgttagcagttttaaatctaggatgtcccttcagtactggcctgtgttggggtgatgggactgaggcttttgtctccactttggccagtcactggatacaggttgccccaggaaacaagtagtagatgtaggacaaagtgactttttctcagccaaagaaatttggctaaaagggctaagaagttcttcagtcaggaagagatcttgtcagcacataacagtatccactggagactcctttaacacaaacaaacaaacaaacccacaaaaagctattatacatgatcagatcttgttttcttcatgattttaaatttccaaatctcatctcttgctgcccaaccaccaatctaggttaggagcttatagtgcctaacataggcacttatgaataagtaggacctcctaaatcagatctatccaatccatcccttatccatcgcatttttcaacctcatgaaatgcttccatgagcccataattagcccgtttagtaactcgttggctctccattggcaacagaataaaatgcatttcttagcttatgattcaagaacaaccactgtctgtctaaataatataggtgttgtcaccccaatcttccaagcacatgttttgctttgttagtgccattgattttttttttttacatttaacacctaaaataaaagatctacttggcttatatggaaatcaaatatcacatagttatctggtcatatttacagggatattatgtccaataagccatatttacctacaattttacttaggtcctgtagagaaaaataaaaaataaaaaaaaaggggttgaggatttgcaagaggacatagttacacagatctaatgtacaatgatatttgaacttctgtggacttgttcttatgagtaacatcttccattttaattaaggtcagatgaaaactttggcattatccatgctgagtcctgagtctcaatcattcaatgaatgagttgctaggacacttagttcaattagctatgaggtatacacatggacagaatgttttacaaaacttggccctactgacttgagactctcacatgtattacaaaaacaagtgtatccccatggaggtctgactgtatatctgccttgtaagatcatggaatgttagttgtgtttaagttcctttaaccttctttctcaatttataccttgtttaccactaaaaatagacacctagccttagttgttttggttttaagattgtttcatttatgagtatatactattctgtggctgatttttttttctccctgatttctcttcccctgagttccaagtacttttcacaaagaaaaccttgttcataattaaacatttcttacctcaggcttggtttcagagagaaaccattcaatcaaaagagtgatggaattctgtcactctgatgttatttttagaagttgtttgggttttgattgacacatgttttgtggtctgtgtgtatgttgctggggataatttaattttaagacattaataagaaaagctcattgactcagtcaaagggaaaatgactttttgaagtcaccacacagttttaagaagggatcatagacaaggagaaaacggccaaggaaactttggtttagctggagtgtcgtgccatagtcagaggattctgggggaaatagaaagccctaagaattagttcatatgtgaaaccccacctgccattttggttgatttcctttcttatatcctataggcaaatttccagtgcctactggtttcagtttaataggtgagaaaagcataacacacataaataaggtttaaaaaacttttaaaggctcaagaaagaactaaatgcattcagaaaaaaagaaaaaattagatctagcccagtctgaaaggaaaaataatggcagttgaaatgttgaaatttgattgaaagatttgagatatagtatttgaaatatagtattctaaatcatttaatttagaataccattaatttttaaatattttgggattgaaatcagttcataatgtagctagagaatttaattcaaatgtaaaggaaggacacctgatatgcacttcaatatcattaaatttagaggtcagaatgaaggcagaagaagagagaaatgattctgcaggaccaacccatgtggtaacatatttatgcagaccaccccaacatgatcggaatattactgccacagtggggcacaccttgaaatatgatgaaatgtttcaaggttgttaaataagaaagaagttacgaacagaattgttttcatcaaattttcactgtgtaataacacattgtaaaaccaatataggagtggatttacaaattctgggcatacataagcctctctgatgacttagctaagctggttttgaaaagaaagtgcaacataatggtgaagattattcaattttgctcgtggaaacaattgggcacataatgaatcaagaaaaatgctgagatcgttgaacaacaaaactcaacacgatcattttttgaaatcttccgtgttgttatggtgatttgtgtatttagaacttaacaatgtgaatggcatgaagaataagtgattatgcattgctgaatgcctttacaagagttcgctaagaagaaattactgctttatcataaatgtattgttactgcttgaatgatgatagctgtatatttgtccctttactcactcagcaaacactattcatttcaaggttttggtgttacatcaagcaaaagactccaactgagaaatggtactattatatacacacacatctcccttggagggtttctgctatgaatcaatattatggaatgactgtgtagcataaacagtacatagcatcttttagataatcatatttagaaacagaaatccttttatatgtgtattgttatagtttcatgttaaagaaggtaaaaatcagcagaactacttttaaaaaaaatcttagagtaatacctccttcccatgagcgttagtaaagataggaaagatgatcgttttatgctacatattttcctattgccaggtcaagtattataaaatttaatacatattgttgtaggactttctccttagttcagctggaaacagtgttcttgtcacacaaccatgaaaaattaggctcacagacactttgaagggtgagaatggcagggtttattgggtaaaaacaaataaaaaggaacagggactctcagcaaagccggagtcctgctaccaggtttcctgcctcatagattgaatcccaggttccaccccagaacaggagaggccaggctcctgccccctgcaaatggaaagaacttaccggctccaccccattctccctgtacacaggccaattagagtttctctggggacccctttgtacctggctgtctcaatatgaagaaaaagtagtcatactaagattttttttttctagaaccaactatctaacataactgtcaataattagaaacaaaactgtacaaaaatacttattatataaatttttaaataaatccttgctaggactttgctctctgaaatttgaaagtatattttaaaacaaattaatgctttatctccttcctaggaatgtattcctcacattgtaacaagttgataaccagaattataattgctagtgaatccgttttcttattctattctctgctcacacatgttttaagatgccatgcggttaccagcagtgaatccgtatgggtctgcagcaacctcagttcttgcctcctccaaagaaagaattcaaccaaggaggcagaacgcaggagagatggaggcaatagagcatgagtaaaagtttatcataaaagctttagcgaaggaatgaaaggaaataaaatacacttggaagaaggccaagcgggtgacttgagagatcaagtgccctatttgaccttctgacttggggttggcatatttctagggtcttgcatctcttctcccctgattcttgccttggggtgggctgtctgcatgtgcagtgggctgctggcacttgggaggtgagcaagtgcagtgtgtttactggacttgtatgcgtgctcaggtgaggcattcttcccttacaaatcgaatgaacctagaaggtcatataacaagtaaactctgccattttgcttcttaaagctcatgcttgagtccactccctgaactcctgctgattgcatcaccagtttcaggttttttttctatctattgggagactgccttttcctggcgctggctgtgaccagttattattttagagaggcagttaacaaccacctgcccatcacctgatggtggcccgacattcctggtggagagcagggagagctccctcctgccccgctcaagccttgttactacctactgtaacagtgctatatagattgtcatgatgattttacaggtgtatacgtatccccaaattcatgaagttgtacatattaaatatgtacagcttttttaataccttattaaagtggtgtaaaaatagtcgtgctacatatgactattttgtcatggccactactgtcatcttgagcattgcaaattagttattctagatgaaacaaaaaaggcttgcctttgacaatttctcaacatgtttagtattttccaggttcaaccaataccactttgaactgctctaaatcaagtaagccagaatgtgtctggcagctgaactactgtgaacctaataaatattatcatcattttctattgctaatcaggagttgcattttaggcaatgcaaagtgggtggggtactcactttctgtagatgattcatggaactaacaatacataatacagcatcaaattaaaaacttatttaagtccaatctatgtgaaatagaacaagtgacaaatgacataggttactagtagtaagtggtaagggagctgggttttgatttttttttaaacaaattcttttctaatgcatttattgcaggcacagagcaagtaatcttaccatcagagtttttgtactgcactctattttccttttcaagaaaggaatttcatgaattgttttaagcacagctgagtgttattgttcctattttgtgcattactgttaaagttctcatttccttttcaaatgtgtaattttaaagacgtgatgaattcttaagaataattttatgatgattaggaaagcaatttttcgagctatatacaatttaaattttatagtgacaatcatgaaaaatagaaatacactttgcagcaaatttgcgaaattatttctgctaaatgagtgactcacataaagcaatttgggtttgttttattttattttttgtcattacatcatgcagctgttttcctctatcccaagaatgtaactagtgattgtaggatcatttcaaatactcaattgtaaaatggcagttttacatatctgtggtgatttaaaactctcacacacatgggtgttaatggaaactagttactttatgagtattaagataatttattaatcttaaatataacttttctcattgtggatgtttttggtgaacaaatacattacttcacagttatttttgtggtgagaacacttaatatcaactctctttgtgttttttaagaatacaacatgattattatctatggttgccatactatacaatagatctctcctcctatttagctgtaattatgtttcatttgagaacatctccacattcttccctccaaaccactccagcctctgttaaccaccattctattctctacttctatgagatcatttgttttttgattctacatatgagtgagatcatgtgacatttttctttgtgtgcctagcttatgtcactaaacatactgtcctccagattgattcgatttgtgataaatgacacgatttccttcatttttatggctgaacagtattccattgtgtatatatactatgttttaaaaatccattcatccattggtaacatttaggttgattccacatcttggctattgtgaatagacgctgtaataaaaatgagagcagatacctcttcaacataatgactttatttcctttggatctataccattaacaaaagtgttagatcatgcggtagttcaatatttaatttattctggaacatccatactattttctataatgactatattaatgtatattcccatcaacagttgataagacttctgttttctccacatccttgccaacacttgttatcttttttctttctgataatagccattctaacaggagtgacataatatctcattttggttttgatttgcattgctgtgatgaataatgatattgaacatttttatatgcctgttagtcctcttttgggaaatgtgtgttaatgtctttgcccattttaaattgagttatttgtattcttgctattgagttgtttcagtttcttatacattttgaatattgacaaaatttaacctacatttatcataaaagcactccatgaatgtatcagatgtgtagttaaccagatgtatagtttgcaaatattttctcccattcagtaggttgtttcttctgtcgattttctcctttgctatgcagaaacatttcagattttggtaattccacttgtctatttttttgcatttgttgtctgtgtttttggaggcatatttaaaacaaaacaaaacaaaacaaaacaaaccttgcccagaccaatgtcatggagttttctcctgttttgtttttgtttttgtttttttttagcagctttatagttttgcatcttatgtttaagtcttgttccatttttaattgattttatatatggtgagaaataaggatttagttttattctctgcatatgtatatccaatttatccaataccatttattaaagagactgttttttcccccattttgtggtcttagtgcctttgtaggaaatcaattggctgtgaaaaagtaaatttatgatttttttttatttctgtgaagaatgtcattggtcctttgatagggatcgaattgcattgtagatgactttaagtagtatagacattttaacaatattactactttcaatctacgaacataaagtcttcctttttatttgtgtcttcttcaatatgtttcaccaatttttcataattttcagcgtagagatctttcacctccctggttaaaatttttggagtatttttttatacctatcaaaaaggagattattttcttgatttctttttcaggtagtttactgttagtgtacagaaacactactgattttgatttttgtgttaatttttatcctgcacctttaataaatgtgtttgttagttccgacaacttttggtggagtctttagagttttctataaaacggatcatgtcagctgcaaacaaggatactttaactttttttttccaatttgaattccttatattacttccttttgcctaattgttctggctaggacttctagtaccatgttaatagaagcggtgaaagcagatgatatggtttggctgtgtccccacccaaatctcatcttgaattgtagcttccgtaattcccacttgttgtgggagggaccccgtggggagataacggaatcataggggtggtttcccccatactgttctcgtggcagtgaataagtctcacaatatctgacagttttataaggggaggctcctttcgcttggctctcattctctctcttgcctgctgccatgtaagaagtgacttttaccttccaccatgattgtgaggcctccccagccacatggaactctgagtccattaaacctctttttctttataaattatccagtctcaggtatatctttatcaacagcgtgaaaacaaactaatacagtggatgtccttgttttgttctagatctcaggggaaaagatttcatctttcccatttaatatgttagttgtgggattttcatatatggactttattatgttgaggtatttgtctatacctaattcatggagtgtttttatgatgaatgcatgttaaattttgtaaaaaggtttcttctgcatctattgaagtgatcatattatttttgttgtccactctgttagtgtgatgtgtcacatttattaattcgcatatggtaagccatcctttcatctctgaggtaaatctaacgtatcacaatgaatgatgttttccatttgctgttgaatttggtttactagtattttgttaaggatttcaaacctatgttcatcaggaatattggccagtagtttgtgttcagatttaattgtatcaggataatgctggcctcatctaatgggtttggaagtatttttttcctgtttcaattttttagaaaaatctgagaattgatattagttctttaaatgtctggtagaattcagcagtgaagccatgaggtcctgggctttttactgatgggagactttttatttctttttaatctccttattcaatattggtctgttcagagattctacttcttcataattcaatcttggtaagttgtgtatgttcagaatttattgatttctcctaggttatccaatttgttggaatataattgttcataatgttctcttatactattttgtatacctatggcattggttgtaatgtctgcttacttgtctctgaatatgtgttgagtattctctttttttcttactctagctaatggtttgtctacttcatttatcaattcaaaaaactaactcagttttgttgatcttttctaaggcttttgtagtctgtattttatttatttttgctctatctttattatttcctcccttccttcttattttagatatgggtttttttctttagtagttctttgagatacaagattaggttgttggagatttttcatatactctgatgtaggcatttattgctataaacttcttttttagaactacttttgctatatcccgcagaatatgttgtgttcccatttatatttgtctgaagaatattttaaatttcatttttaaattttttcattgtcccattgtttgttcagggacatgctttttatttccatttatttgggaattttccaacgttccccctgttattgatttctagttttatgtcactgtggtctgaaaagatacgtgatatgactttaatcttaaacttgtggaggcttgtttgatggtctaatatagcatctatcctggagaatattccctgtgcaagtaagaaggaggtgtattctgcagctgttggatggcttgttcttatgtctgtatacctgctatattcatttagtcagtaggacagtttcaacatgatgtttctatgttgattttcagtctggatgaactatccattgctgaaagtgaggtgatgaagtcgcttactcttagtgtatttcagcctatcgcttccattttattaatatttactttatatatttaggtggtcctatgttgggtgtatatatttataattattatatcatcttatcgaattgactactttataatgacctttttgtctcttttcacagattttggcttaaagtctattttatctgatataactatacctagccttgcactttaatggtttccattccctcatttttagtccatatgtgcccttacctgtgaaactgtctcttgtagtgcatttcaacatataattgagtcatttttttaaattcattcagctattcagtgtcttttcattagagaatttttttattatttatatgtaggaacttactgctgtctttttgttacttgttttctagttgttatacagattcattcttcctttctttcttactgctttcctttgtgattaagtaattttcatgaaaattgttttattctttgctttttctgttagcgtatctgttataggcttttgagttaatgttaccatgaggcttatgaaaatcatcttattgttgtaacaagttattttaacctgataacagcttaagtttgattgcaaaaaaaaaaaaaaagacaaagcaaaagcaaaaatgtttacatttttactcgactcctccctaacagtttgaatttttgatgtcacaatttacatcattttatattgcatatcgattaacaaataattttagttattattattttaataattttgtgtcttaactgtcatattaaaatgtttggttgctacaccatcatagagtaataaaatattctgaatttttgtgtacttacattacagtgagttttgtactttcagtgatttttgttttactcactggtgtcctttcctttcagcttgaagaactccttgtagcattctttgtaaggtggtgactaactctctgcttgtgtttgtctgggaaattatttatttatcttatttctgaaaaacagctttgcagggcatagtattttttgttgacagttttttcccccagcactttgaatatatcatcctgctctctcttagcccgtaagatttttcttcagatgtctgctattggcttattagagctctcgtcatttgtggtttgcttcttcgctcctgctgctttccaaatcctcttttttctttgattttgacagttgcagtataacttgagggtaatcttttttaaattaaatcagaatgaagactttttaccttcctgtaaatatttctatctttctccaagtttggaaagttttctccttcaatttttaaaataatattttacctttaactgtcattgcttttttttgaatgccaatgattattatatttgctcatttaaggttatcccagaaatcctgtaggctttctgcattttctttatttttatttcctttttcccctttgtatattttcaaataacttgtgtatcagtttagagaatcctcttccacttacgaagttcttctgttgatactctctatagatttttaaaatttcatttgttgtaatttttagctctaggatttctgtttgatttaatattattattatttcaatttattatttcctcatcatagtcacaatgttttcttcatacctttagctgtttttctgtatttttttgacatttgttgagcttccttaaaacagttatttttactttatcgtgaggcatttttcatacatctccatcttttcagggttagttgttgccaattacttttgtccctttggtgacttcatgttttcctgattattcttgatttttttggtcatgtgctgatgtctgcatactgtagaagtagatacttattccagtctttgcagtctgcctttgtctatgaatatccttcagtgttaagcctgtccagaggttaagagtgggccacctggtgtgatccttaagcccgtgaccactgcagctattgcagtactagggggtgccctatatcctgaaccaccatggctggtatagtgactggtcagaattttatggatacagagcctgccacaatgcagggctaaaagtccatgaattctataattagtgcggtgctagggtgtgcttgaagcccatagttgctgaggctagtgcagcagtgggtcatgtctaaatcccatgacctctgaggtctgcctgttgtggtaggttatttagaatccaaggctgctatagttggccagtagttatgtgaactagaatttgagtcattcttgcagggcctgggggttcctatcttgcactatggtgggtctaaaggatcaggctacagataccaggctaaaatcagagatcatgcaggtctacctaatgctggtttttactgtggtgggcctggtatttgtgtccaaggcaaagttctacgattgcttacctctctttctcccaagtgaacagtgtctctctctgctctgtgctacctggggttggaggttgggtaacatgggaaatgcaaaaatgtccgttctaccttttttggtgtgtcttttctaattattgtgctatgacaaggtacagtcatcttttacttggttttcgtagctcttgtgagatatttttacctatggatagttgtcgaaattgatgtttcttccggtgggtgatcactggagagtcttaattgacagtcttgctcggccctcctcaggtttgactattcttaatgtcctttttctattgggcacctttaaatggaacacttaaaacagacacgcatcttttaattattttacagatgagtaaaagaatcaaatgtgaatttattcaaggtaataaatattggtttaaagaaattaccatagatcttaatatagagaaaatcataattgtggcttacctataaagaaggcttggtgctgggcattttcttcttcattttttaaattctgtacgtctttccaacacaaatgccttctaaacactgatgatgctgtaattcttatctccagccatgaattcttcataaaatctgagacttatttccaaattcctctagttagaggactctagaaatcttaccaccccatgaggatagttataatgatctgaagtccaggttcccctgtaacaaagcttgtcaggtatttgaaaaaaaagaaaagatgtaacactgaataaaaaagaaacaaaatataaggaaaaaataacttggaataaatagaaattgtacaggggaaggaaagcttaaaaaattaatatttttagatagatccaaataatttatttaaaaatgctataataaatagtgtttggaaattaaaaataagacatggtaaattaaaaatgtaataggagacatttaaaaaaatagtcaatatgtttagagaaataaagttgagaaaggaaatcatccattaagtaaaacaacataaggcaatgtaatagaaatatataataggtagggtaataaagtgtgataacaaatattaaaataatgaaaattatacaaagagaaactttaaaagatgcatttattatataataatttactgtgagctatgtgttttcagaattaaaaataaaaagagaatgtccagccaaatggatgaacatacactcacatagagacatgtaattatgaaacttcagaaccataagagtaaaatgaaggttctgcagcttcctgtggggacaaaaacaacagcaaacagaaaatatatcacatacaaaggatcgaaactcaaaatggctttggactttccaacagcgatactggaagctagaagataatccagttgtgcctatagaattctgaaggagattatctccagtatagaattctatagtgagctaattattaatgagttgttagaatgaacacatacattctcagacaaacaaaacgtcacgaaatttaccccctttactttcatgccaagcaagctactagaggattatttccatccatttgggctgctataacaaaataccataaactatcaataacagaaatttatttctcacagttctgggggtcaagaagtccaagatcaaagtatgagcagattcattgtttggtgagggcttgctttctggctgatagatggtgccttctagctgtgtccttacatgtggaagaatctaacttgctctattgggtctcttcattagggcgctaatcctaatcatgagggcacttaccttagaaccttaacagctcataaactccccacctcccagtatcattatcttgcaggttagggtttcaacaaataaattttgggggacacaaacattcagaacatagcaaggatgttccttccaaaaaaaaaaaaaaaaaaaaaaagaagaagcagcaaactggaaaagaagacaaggatttagaaaaccaaaggactaacagaaaagggttgtatctctagcattatgaggaagagaagtcccagagtgactatctgtcctttcaaacaaagaaatgaataaggaagatattagagggagcataaagagagtgctacataaaaggcaaattaaattctgaggctgacaaaaaatgaaagtcctatattgacagctgtatagcatgactagagcagaatcaattccgatagaactgagttctccatgtaggattgcaagtagattacattatgtgattgatcttgtacgtaattataatgagagactactaaaacataagaataggcaaaccaaccccccccaaaaaagtagcaagttaaaaaggggctataaacaaaaagcgagaaaaaaataattattgtacactacactgataaattttgaataatacttgcaaagttatattaatacaaatatctaatattattaaaccaaaaaaggcaggataactaaactgctatgataaaaaatggggaatagaggaaataacaacgtaagagttaaaatctcaactaaaatcagtcaatagaaaatatttaaaattaataaatcaacaaatagatacgcatgcatattatttagagatatatataagatatatatacaagaatgccacagtaaagagtggataatggtgattttgagagataaagcaaagaaatgtctacttttgttaggaaccgtttaatgccatttaactggttgggtgcagtggctcatgtctgtaagcccagagttacgggaggctgagtgaggtggaaggactgtttgaggctgggagttcaagaccagtctggactaatatagtgagcccccatatttacaaataattttttaaaaattatccaggcatgatggtgcatatctgtagtcctagctactcaggtggctgaggcagaaagattccttaagcacaggaattaaaaattactgtgagctatgtttatgccattgcactttagcctgagtgacagagaccctgtctcagaaatttcaaaatatcatttaactttgtttttgcttgttaattaggtacaataacaatacattcaaaataagaatatatttccatgatatttggcgaggaaatatatttggttagatgtacaaaaaactattgaagaataaaatcgatgaattcaataatattaaaacttaaaactcatataccaaaaaaaaaaaaaaagaaaaagaaaaacggtaacaaaaataacaagaaaactacaggaagaaaatgaagccattacatagattgggataatataattgaaacttaaacaacaaatgaaatatttattttcagaatatacaaagttctaaaaataaaccagaaaataattgaccttgtagaaaaatgagcaattggtcataacagaagaaaaaattcaaatgtccaataaatataggaaaatttacaaatgcaaattaaacaaaaacatgacacttcttattggctatataggtaaaaatataaatttccggaataccaaatatttactggcaagtggggaagagaaattttgcctcatatactacttaaaagtctaggttggtacaatcacttttacaaatagttaaactgtcatcgtatggcggagttgaaagttaatattcctgataagataaatgttcctgataagagaatatttacactaacagaatcttagtttaattcacatatactgatctaattactgcaactcacacttttattattgcctttattttgtagatgagaaattgaagcatacagaattaattagcttctccaaggctacctagctagttttgcttgtgttaaaacgaatcaactagataatatggaatatactggaaaatatattgttgagtaagaagtaaaaacaaattgttgagagcacataacagtgataaatgtataaagttttaaaacacaaaataaagttttatgtgtatttaaataatacagtgacttattccaaaatcagaaaagcacagatgtggaagacacccaccaaactgaagatagtattggtctctccggaggcaggatcaaaatatcaggaagagcttcaaagctatgtcatattttattttttaaaatgatccaaaatatatggtaagattcaaatacttgttaaatctgggaggtgtgacatagttatttttgtattattctctctgattttctatccacgggaataggaatatttcataactttaaaaagggaaatgatgtaatcggtaacattgttgtctcctctttaatctcacagatattcctaggagcaacccttgttattttttatgatccatacacaataaccaatattttaaatatattatacaaaagtattgtagagaaggaaaaataatttttttctctaccctactgggttcctagctggaatagacccctgcaacaaaggacaaatgaagaacataaaagcaaaaagaagtttattaacttgtatacctcatttacatgtgggagatacccagaaaaatgagtaagtcaaagacatggcttagagattaggcctaaataccaccttcaactgaaacaaagaaagaaggatatgggccagggtgcagtgatggtaaggtgaccaagaaaagtatggtaatccatgataaattctattatgcagacttaaaccagtgccttctccactgaaaagagtctctggtgatttagttatccttttcttctgggtactgaaaggaagccacccttgcaaatggaacattcctttagagataagtatttctctttaaaaagagtaacttctacttcattttcagagcttctttgttgtctgcagtttctcaaaataatcagctcaaaataatccttatggagacatattttggggtatcctatcctggtttcctacagtatcatgtatcttattgtaggagggggatgatagtctttttattttacttattttagattctttttcttctactcatcatagagatggctctacccatctggctggagccctgtaaattacactggaaaaagacagattaacaagaaactaaaactaaatagaaatttattaacatgcacaccatgcacatgcatgtatataggagtacccagtaatgagtaatccaaaggggtagttagaatataggcttatataacatcttaggctcaaaaaagaaaaaagcgttttgggcttctgggcaaggggtactagttgggaaagtggctaggagaagtatactaaacaagggttgttttagtgaggtttgttatacagatttatgtaggtgtcttctcaatccataagatttaagagttatccattgcctgatatgggaaagggagatatcttttacaaatagaaatctcctttatacatgtaaatttattttacaaaatgaaaatttatgccctgtttttagagcttttctggtgtctgccattcctcaggggcctttagctcaaaataatgcatatgctaaagaggtgtattttggggttgcatattatgatacctttcaatataaatacaagaattaaatagatgacataaaatgcatattcagaaaaaaagaagattcctcctctcccacaagaaaaattaaatttattttctctaaactaaatcttttctgtattttgagttttaaagtgtgtgataataaggaaaatttatgagtataaaatatcttcatatacacttctagtcatcttccttttagactgtgagaacatgaggctcctgtcattttactatgtttccttgtaatgcttttgttactggggagtatggggtccttggttcctgtcttcttggaggaaagaattctgccaagtgacacacaggggcaattcagcaatggcaatgtttatttaaaggaaaaagtacatgctgaaagccgagtcagggtgggctgctccagaatgagatgcattgactgacactggggaaccccctttatgagagttttacatgaatatttacaaatgggcataaagaggtgttaccagtaagcacattttgggaggtctcaaaacatgtgtactacactagtacatatgtcgcatgtttcattagtattttaaatccccactcatgggtgtgttttttactattatgatgagcaaaatgttacctttagggtgagccaagtcaaaatgcacatgctcgctactggggaaagtccctattgaagtgatttttctgctagggccaggtaagtctcagtgagggctggataagcctaaccataagcccagatgtggctactgttaattctgattgctctaaccacagagcataaattttctttttgcattgattccaagtggtgcaaggtatttagagcttctggggctttctttcctgctatctgtctgtctatctacctgtctatctagctacctactctaatgcttttcttcatacaaataaatgcagtaacttgtcatgaaattttaaaaaataagaaaaaagccaccttttgtataattatagttatattattgaatttcattaacttcatcagattaatgtaaattaaatatctgagcatatttaatttctagtttcttggttgtgggttgtgggctgtgtaagtaagaaaaaagccacctttttttctgggtttcctataacctgactagaattactaaggtatctataattaatgtaaattcagctttcataaaattaaatatcttaaaatatctgagcatatttaatttctagtttcttggttgtgggttgtgtaagtacttcagaactatctttagtcacaccaacaaaagagaaaatcatactcactctccaataagtaaattacaaaaaaaatacttatttccttaatagcttttgacataataaaatacactaaaataaaataaatgaacttctctccctaatcatcaatggaaagaaaagctaagcttctaataaaataagtgcaagttcattttcctgtttcttgttaaaattatttaatatgacaagtgtctaatacattattgcatatcaacacaatattatccactaaggaaacacctaatttggggtggccccacgttttcaatagacccaattattcaacccctaacattctattcattatttttttaggatccattagcaaaatattctaaactatcatttgtagtaacaataaggaaagaccgtgacttgttaatcctggttataagcgtattgaatgacctactcaaggaaggaggagcagaaaataatgagaaccagctggttctaaatcttccattatttctaatatataaggagagaatgaactataatttttatggtcttcatctgacaatacttcaagaagaggtcgcttactatggtgattcattttcaaaatttacactttagtttactatacctggtgtgggaaccagtttgcttcaagaaattataattttaggaaatggaaaaaatatttttcctctattcatattaggtttattggttgggtccctgcaaattagactgaagaaagattagttaacaaaagaaaacaaacaaaataaaaaaaacaggagttttttaagacatacattgtgcatacacacgtaagtacgccgtcataagtaactcaaaggattggttacaatgtaggcttatatagcattctgacaaaaataattttatagataagcagcaaaacaaaagaaaaggactttgaacctctgcggccagcaaattgtggaaaggcaaatatgtagggagactaatggtagataaagcctagttcgtaaggtttatttatctggactttttctctgtaccttgttgtctcgggtgataaagtggttattctttttctgatacaaaaattgagaaagaggagagagacatagccttcacaaagagaagttgttttgtgtgttcaggtagatagggggagggcagagaggtcttctggtgtttggatttttttttttttcagttgccttaagttcaaaatatttttaatgctcaattgggctattttggggtaatattactccaaagcttttcattaaaaaatagaaaaattatacaaatgccttccaaagatctagattatgcatatatagaaaacacaaacacatacacaaacatacatataagtagcgcaagtttccatgtcaagtgtacctatctgtctttactttgttaaatgtatcacctcttgctaacatgtatgtcttactatttagtagtgggagtaattcaaaaacactaaggtcaatgttctgataatcatccgatttttccccattctgcttataaaacatcagatttataaaaacctaatgtctgattgagaaaaggactcatgaacaaaaatcaagccatataatgtctaacaaaattggtggttattatatggtagcagtttgacaaccgacagttttcatccagacttagtccgatatgtgcatttaccttggctgtagaactgtgttgtttatttcacttggagttgtgctgaattaataatttcccttcaaaagggtatcattagtagccagtggacttttcaagctgtttattttgaatttgcaattcaattgaatgaaaggaaatacatataaatatggatcatttcagataaaaataaggcttttgttttagtagggaaaatatagaatagcttaactcaacatctagtagaatatttatcaatctagttcccaacattaatgagagcttcaactagcagcaaattctatagacttccttctacctagagcttaagagataagtcatcagcttaaattttggagtgtgactgtcacaatgtttcaacaaaatcagtcagattctttagaagctacacagttttcacagttattaatgtatatagatgtatatgaaaatacatactgatgtaaatttctatgtagctctgcccagtggaagagcctaggagcaacaatgctccagtatgctccagtatcattgaacacaccaggcgtctatatcttggttcttttttttttttttttttttgagacaaagtattgctccatcaaccaggctggagtgcagtggcatgatctgggctcactgcaacttccacttcccgggttgaagtgattcttccacctcggcctcccgagtagctgggattacaggcatgcgcaaccacgccaagctgatttttgtatttttaatagagacacggtttccccatgttggccaggctggtcttgaactcctgacctcaggtgatccattcacctcagcctcccaaagtgctgggattacagacgtgagccaccattcctggcctagatcttggttctttagtatcatttttgattaatggattatgccttcttgaaaaaaatgatgaattttggttctttagtatcatttttgattaatggattatgccttcttgaaaaaaatgatgacttttggggctgaaacaagacacgtatatatgaatctaaaatatctatttgtgccagaaagtaaggaaataccagaggatgatggtaacctggcagaagtacatagcagtgagtttagaggggataccattggccaaatctggaacaatttgagcatcaaactatgtagtgatactaccgtattataactcactgaataaaataggaatctttcagttcatatagttatggacaaagacatgagtaaataaatggagagaagagaaagctttttcttgtagaagagtaccaactagtcagcgcagaagtaatgatggaatcaggaaatcaaaatatagcaatcattgtagtgataatcaatgctgctaagaaatatactggctgagaaaactagcaggttaaaatgtgatagggaatggaatatttacatcttctaaatgtacctccccccgccccaaataattcttaattgtaaagggaagaaatggtaccttccacagtagagaagctggcatgttatcaaagttagtatcaccataaatggaacaaattaatatcctgccccatctgaggaagcttcaccaccgtgtatttctgccaaaatacctaccctgaatttcatcctgaggaatcaaaagacaaacccaaattgatgcattgtcaatgggagaactggcctgtgatatagaactatcaaggctgggtgtgatggcttacacctgtactccctgccctttgggaggctgaggcaggtggatcacctgaggtcatcagttcaggaccattttggacaacatcatgaaaccccgtctctactaaaaatacaaaaattagcttgacgtggtgacacatgcctataatcccaggtacttggaaggctaaggtaggagaatcacttgaacctgggaggcgaggcgggggttgcaatgagccaagattgcaccacttcactccagcctggacaactgaatgacactccatctcaaaaaaaaaaaaaaaaaaaaaaaaaaggaacaaggttgtgagggtaacagaaagaaaagcaactgttctggattgaaagaggcataaaaactaaatgtgacatgggattctgaactggatccttttggtattgttggggctcagaaaaccatactcaaaagtgaaggcctcagaagcagcctcggaagcaaagtttatctctggcctcctattccgagccactcattctcctctgagacaagccatggaaactagaattcatctccccagagcaggtcttaggaaccagaagccctttttcccaaagccagccatacaagctaaaaatattgttgtcatattttcctgtcttatctgggtaagagctggccatagagaaagtctctgaccttcctcgtttgatggcagccattccagaaagtgtccagcaccatattcaggaggaaggaacaccgcatagagaggccaagaagaatccagataagcctggctgggtttccccacctgggtctactagaattagaccagatccttttgtctaatcacagttctgcatgcctgtccattcttcattgaacctaagcataaaaatggatacttttccctgttcctttaattcttcatcctgagggctcccatgttatgtaaaaccataatgaaatatatttgtgatgcttttctcttgttaatctgtattttgttataggaatgtcagtcatgacctttatgatggggtgggaaggagtcaccccttttctgctccaatattataaaaaatggtggtgccataattggggaactctaaataagctttgtgcattagatagtagtaatagatgtaaaaaccctcattctaaggtttgtcatggttatataagagcatattcttgtttgtagaaattacagagtaaaatactggggatgatgaaaagtcagccagcagcttacttttaagtgattcagaaggaataaaatgtgcttcatagtattcttaaaatttttgctgtaagtttaaaattgtctgaaaaagagaaaaatgagaaagtaattaggaagatgaagtagtacttttgaaaacgtactaatattaaggagtaaattttaatttgaaattgaacctaaatagtagttctaattgtggtcacaacttgaaagtaaatgacagattaattttagagagttttaattctatataaaatttaaaagttgatcagtatgaaacttgagaattgtgatatttgaggctagtcaagaatcaatgaaactaatttaggcttagaaatatctttgagaagttgtcatgccaaagcttttgaaaacataatttgtaattagattgaatgttttgatttggatataaaactgacttagaaataataagagcagagcaagtgaaagagctccccaatcctgcccaaaactatgtagataaataaataaatactgaggccttttgggacctgctagtattgcagccagtgtaaacacagatgtgtagtgatgtggaaaaatgtgtttaaaattgaatctccaagttgacaactcttatagatgataaaaatcaaattaatggatcaacatttaccaaagttcttttaaaaccattttgaccccccaaaatgacaaacaagcataatccaaatatgtgtagaaaaataattcaatgtgttttcttgaataatagtttattaaatattaattatatgatagcaagtatgttgtagaatgattaaaattaattttctaagtcattggtcctatttttgaatagattcaaatagatcaaggtaattttgacagaacgggtcaaccattttgctagtcactgagagatgtccctggaatgatggtttgcagttgtggtgtactaaatattgaggggtgtactagacctggagggaagtgaaggaaatattaaaacttccatttgtctttggaatgagaactaaacttttagctttgtgctaagtggtttcttcagtaaaatatcaatattttatttatgtttttcttacattaagcatccattttagctaacctcacaaaatatactgtccctaaaaactcagtcttcatgtaaacactttgataccagctgttcttccatctaaaattattttcttcctcctcattgccttttcttcctgaagatgatcctgtcttcaggatctagttctctttctgccttttcatggaacattgctacaatacttcatccgtgtccgtctatcccctctgaatatttacagcatatgttcttagcataatttattcagaaagtaatcatcattgtcttgtgacatataaggaagtattttcttaccgtttaactctatctatacttctgcaatacaatttgaggttcttgaaagaggaatcctgtcttattcctctttgggataaggggaatattggtagacccaatgtctaccatgacccaaatacagtgctaagagccgggaacagaaatctaattatttctctcttccgacatgctttgtgtttatatgaagttgtggacaagttaatgaaagatgcaaggtaaaaatatgaatgcacattagctaatttgtctatattagaagcacagtgagttatgaaatggaaaaagggatgtttgtggcatgagatcagagctctaacaatgcctctccacaaggagacttccagtgatgtttttctggcactcagcccttagatatcattgaattaattcactaaagcaatctgtatgctgtctatgctcattttaatgttaattattctgtgttccaaaacaaatgtattttctcagcaggaattaaaatttcaggaatataacataaaaaaccctgtatcgtttgaatttttcataggtttttttctaattaaaacatatattgttaagtgcatgtttgcttttctaaaataacacctagtaatttgtaatacattggtttgttctatgagtgtggtttatgatggtctaccttttatccactggtgtaatatcttacgttttatcagtaaccatggaaatgtttagtacatcatccaacaataaataaataggctaacttcccagaaatgaaagtaaataattatttatttaattcaaagtagagaacatagcatggatttaaaaatcttatgtaagatccaataatccaaatatttaatattttctctttggtttaacataatgttcaaatccgaaagcctgctttgctcaccaacacctcccacccaacaaaactgccaacatgccaaaccaagtggattgatttaacagcaacattaagctcccctgccagtgtttggtggaaaggcggttaatccggagtgaaaggcctcaaatcttgccaacaggaaacaaaaaaataaagaagaggccatctgtaatacatactcatagttagtcagtccctggagattcttcagctctttgtctgcagcattaagaaacacatgctaatatgttattctcttttgttgactgctctaattgagatgcctgacaaattaatacagaatattaagattattaatgccaaatggaaaaagaagccttactacaaaatgtcatataaaagttatttgtaaacgctaaggaattaatttcttaaattatttcagcaaatgttaactttaattgtgctcaatgaatgtttatggatgcttttgacacagtggtttttttttttttcttttttccctcagagtatatttttaggcagtttaggaaacaaaagataaatgaatgattagttgtttagtttgtctgattcaaggcatagattggatttaaaagagcaggaagcatgagctcttgaagtggctctgggcacactgccccaatttctggatctcattggtaaaatggacagagtagggttactgggggaactgtgataatataaagttcttagcacctgtctgacatttcttatttttagttatattgtattgttttgtcttcaaatgcagcagataatcattttttattctatagctaacatgctggcatcatccaaaaaagtgacttctattttttttaattaccattttgaaaacaccatgccctataacatctaaagacgcatttactttagtgagtgggaataatgataatataatcccatggcttattcataaaagagaaccttggagatgctgtggtaatgagcaggtggtaacaattcttgattatttatacatttttgaggatataatgggattgagtcattgaactgctgttgtatcaatatgtaaatttcacacatcagttttttttaaagctgttttcttttgaatttaagaagggtaaaaacacaccagaaatattttaaaagagaggcctcagatatctcttaaactatcatgttctgttcacattcgtcaccatcaaacttatattctatctctaatatatcctacacattggcacatggctcccaggaagtagtgtctacagtaagaaccgagaaggtaatatacttgctctcaatttcttccttcttaggaatgacaggcaaaataactgtcacttctgtcaagtagcaatagatactattatgaagtatatcgtgtggcaaaatctctgctttaactgagtactttaaaagtacttacctaattttcattgcttgagtactgtgctcacccctttgggaacaccagaaatttgataattttctatctgagttctaggagattgaaagctgtgcgacttttcaaaaactttctgacacatgagtgctaatttgagcagaatttagctagctctcacaagtgatgaaagcgcggaagaaccagtgagcactgtcagtcttttaatctagtatctgattgcttgtctaactgtcattggtgaaaagcaaatatctttgttcttcttctgagttcaagccggatgtgctcctgtatttagcatgacaggaaatctcaaacggcaaagaattacatggatttaaggaatctgatattcctgtattcaaatctcccctcttgttcatgatagagtcttctgtagaaaatctataaaatagcaagaattaaaaacatactataaagtatatgtttggcttatcagaaatccatacaaactactttttctcagggcctcttaataagaactggttccatttgatgagtgagttgcaaactcttgaaggcatattgacagatggtttcatctgaacaaactgattttcttgatttgccaaagtgcctaaaaattagttttcaaatttttgaattatatttaaggcattttgcttctgagaggtgacttttgacagacccatattgcttcttataagaaacttaggtgaataaggcacaaaatagtttctagaattacttaattgtttttcaaggaaaaatggggctcaaagtgaatgggccacagggaagttacagctggatcctgtagagatcactgagaaaggtctactccctaggtcactgtgcacagaaagacaggcctactgtgattccacagagaaaaatgtgtccggccaatggacactctgagcacataaactactgaaggaagagagattgatgatttgggatgcttgagaaaaattttcctgcatttattcttaataatatgttagtaatttaagctagtaaaaaaaaaaaaagaaatcaatgtaaaggatttcctgacttctcttttctactgcaaataaagtaggttgatacatttaaaaagggctattctccttctccttcaggtcctttatttctgcttcttcttctgtcatattttattttttttctcacgtcttttcccaccatcctcccagttgtcttccttcccaacatcgccatttatttcatattatattcttcagcattacacacacgttatttaactggaaagtataataactacagccatttcttaaaatacaacattaatgggatgtaatttgttataacatgccatttgaaaatactgcatttttttactttagtaggatttctctactagcaattgtaattattgtattgtgatgtttcctatgtatgctataatatatgctataactgcctaccttacctacagatgaaaactctacaaaatggtttctaaaagtatctcaagtaaaatttgattttgtttcaaattacctttaaatttttaacattcttaacttcttttttaaaaattacaatttttcataatgccaaagataggaaatagtgagtaaaggacagtaaactgatttatttagcgagtaaagaacagtaaacttatttttactaaacaactctttttacaatacactctcaagtctaaatttcaaaatgttaaaaaaatgattcttgtacaaatataaagtgagcatatatcaaagatttatttaacttattcatgaggaaactagcagaatactacagctggtttaaaaaataaaagatatgagagaatatgatcaatgaatgaaagattgttgagataaggttacttcaattagatacaaaattggctaataatgtcctataggcaataaatctgtaactgagccatcatttctgttggctggaaccactaacatctctatcagaaaaaaaatcttttgtaatttattagtcttctgtaagctgacatttatctgcggagaacctcagttctattcaatgataaaagaaaaatatgcatttctctagaaaatcagtgttttgtaaacaagtttgttagataattcttcagtatgataaggcacttagtaatctttttaccataatttcagttttggataatttatcttactaaactctgtgtatattccacataaaatccaataaaagtaccaattatactggttaggtacagaatttttcagtctgatagagagctgcaagacaagcccaatttctttcttgaaaactgaaacatagtgaagaagaatatttacctaactccttgtcctataatacccactctatgactctgtcatggcatgtgccctaaataaacactgtccatgtctgttatttgatttgcgtgagagaaatgtatcagattttaacccatattgcataaattactagggtcttaactggatgactggtttggatggggaaagggataagagaggaagaaagaatgaataggtgaaaatcttctcactctaatgctttattcagataaagttatttagttttgatagacaaactgaaattgtattcacattttttaaaagagagttttattcaaaaactgtttttggaaacccttaaacttctaaattaaaagtcatatgcaattgcaacaatttgaaaaactggctgcatgagccagttaaacaaatagtaaagtatttggataaccaggcactaaggagattaaataaagagccgctatgttctaaatgttgataagccaaagacaggatagtgtgtatgaacctgctagttcccttgaccaacaggcatctccttctaaaaaggagtttgagaccttatcttgagaataacaattaagggcagaatcagaactaatacctcagtgacaatttgtacaattaccagtgaagattagctgcccaagatgatctagatctccatactacaaatctcttttcagtgagtaatatcaaaattatctctgtgtaagaatgcgtgataagaatcaggacccaaagagttaaaaaatatagtttatggaaatcattatttgttgttttagtaatccctacattttctaagtagtactgagagtttgttgtccaattggaaattcacatttaaaactcttaatctcaaaaaatatatcactaaggaagtaattatcttctctcaagtgcagccagtttagctgagtgtcaaacagcatttctacatattatttttctctggtgtggtgctgtctccttgggcttgtcttataagttgtttcacgctttaacactcaataaatgcatgatagttgaccgaatgttaacttatgatatacgacatttttctctagatgtctcccaagttgggagtactaccaaaataattccccaaaaaagcaaaaataaacaaacacaaagtaaattcaaacaaaaaaaggccctgcatcagtatccatataaccttcctagaagggcttcctttataggttaaattttaattgtgtttggtgttgtgggtagagctgtcagtattggaatattcatcaggatcttgatattaaggacttattatttattactttattttatgctcaatgacccttctgcctattgcatgtaaggcagaaatctaggtagaaggaatgcaggtgaataaagatggttagtccctagtcaacatggttcaaacataatatgagaataaaacaagtgtgtgaatctttacagtacaaagcagaaagtactttgtgtaataatgatgtttcagagcaggaagaactcacaactaattagttctaatcaaaattggggtataaaagagatagttgctgatagaggtcatcaatgatacatagaatttagctagaaaaaaaataagtggacagaaatgtcctggctatagcaggtagcgtgagaaaatgaagaatataaaacaggattaagacaatggagtagtatagatatagtatggtatggtatggtatggtatagtacagtacagaatagatatagtatagtatagtacagtatattagtatagtatagctatagtgtagtatagatgaaatacataatgtttgtaggtgattgtagttgattgggaaaaatagattttgcacatatcatagatgatcccaaatcctaggatgagctattacacttgatgcaatcatcaccaacataccagtgaaggcttctatttatataagctgtttaaaaatatttaatagaatctatttttgaatatctttctgttgttctatagactttattgaactagtgtggaactggattttgaatgcctaattaggatgaatttcataacacaatagaaaggctacagggttaaagggtctagtctggaatgatagatgcgcacaaattatgtcttgaccttgattgttagttgtcttattgaaacactgtacagctcacaaaaccactgggccccatatctccttgttatatggagttctcctttatttgagttgatccacttaatgctgtcatctggaggaaaataccagactgccacactgtgctgcattcttagtgcatttgttgttattcatatacactccgtaaggcccagtttgataggaaatttagaccaatgaaataacacagctcacctcctgactcctataatgacccaggaatattgtgtcatcaacaacaggttttctaaataatattgcctttaaaaatactttttaaaatatatcaggggcttggaagtttgaacatagtttcagaagtcaattgaatatttccttcatcccagcataaatccaggaaaacagagaaaggcatggagtgggatacacatagtcagagaacactaaggttgggcaacaaagaaagaatgtagtttcatgttcttagaaatattattattaagatgcatttcttgttaccatttttcagtattttgtgattaaaataaatgaggcaacccagtacccgaggttttggatgcatgcttttgataaaaatcctgaaacgagtacatgattacataaggaatcacgcaagttcaatgagcatccaaaagtcccagaacgagcttgtccagcccagggtacgcaggctgcatgcagcccaggatggtttagaatgtggcccaacaccaatttgtaaactttattaaaaccttatgattttttttggcaattcttttttagctcatcagctatcattagtgtgtgtattttatgtatggcccaagacaattcttctttcaatgggcccagggaagccaaaagattggatgcctctattctagaagctgattcactctcagcatcccacatactcccttgttttttattacatattctatagacatcattatttcataggtccaattaaaatgctcagggcttttgttttgttttttagccagttctttgtatgatatatttctcagactaccactatcctgatcagtgtaaaagataagactattattccccttagcatgaatattttgtttctaataatttgctctaaggtcaaaatagtgttgtcatgtgtctcacttcactcacttttctcacagttataaaacaacctcaaggtttctccaaatcaagctgttcttacaacaattttcttcctcctcctactggtttaattcactttggaacttcaagatatttacacaaatattcaacaaacttaatcttattatgttttacctccttgtggtttttgttatttccaaatgttgcctcagtcatgtaacaccttgtttttctcctaagcttttaaccccttgaacatttgataacaatttcttatttgcattcatcaaacataaatcaatttttgacccatagagggttaaagatagaacactccaatcatgaaggacactcatgtacttgacatttatgtatttataaatatattttaggtatggctatgcaaccctattttctcttattttttattttttgtcatgaaaatatttttcaagtttttcttatttttatatatatgaaatattctatactcttttggccactttagctgtcctgtagaccctatctagaccttccggagttttgctatttctttgttgcagattgttgaccagaattacaaacagtatctcatagaaacactgatttctacaaagtgagataaagcttcccattttatttctttggtctgatttcattgtaagagttcagtgagtcattgcctgccaggagtcatctacagtgagtcctagatcagtccacagctgtgacgagttcactattccagaaatacaagtttgaagaacttcctacccaaccctcccttagaaaattacccaaaattgatcatgtaaagcccactttctgcttctccatattcatttttatggcaaagtttccccactggcctggattttcactatgcagaagtgttcagggttatctacaaacataatacctaaattgtatatatttataacacatatatatgtactctatatacacatatattgtactatatatgtgtttatgtactatacatatacgcacacatgtatatgtactatatatacacatacacaaacacatggtttttttttttttattactaacctaaatataaaataagatctctggagaaaattttgttaatgtgtttccatcatgaaaacacacaataaacttgtttattgttctatctataacaaaatatttaaactacttttatcccaattcgaatatcattcttgtggaatttgccaaagtatttttttccttcaaattggaaaacaaacatgggactcttcttgggagatatttatattcttaatcaaagaacttcattatattcatcaaacaccacagcgctggtcacttacatctgtctaatgaattatatttggtgttcattgactctattctttttaatagaggtcatggtttgttatctatggaaccgagaatcattaatcatgacttggaattaatttgaagagatgatttttaaaaacttgtcataggcctgccttttgcagtacagggttcagggttccttgcttcatgataaacatttgcataaaagattgaagcttttagaaccttatcgtgttgttcaaatttagggatattaaaagaggaagaagcctgagatgaacacgggcacggcaactgatagcttcatccactgaagagggattttccagttgcatgcttgtttctctccctacatgtgctaacatttgtttagaaattttatattatgttgagactaaaaaaaatcaactctgaggtataaattttgatagtgcaaggacccatttatcatgcttgacatataatcttttaaattaaatttttattgtgcaatgattacagtttcacctttctttgtaagaagactttagagagatgccgtgtatcctttttatccagtctcctccaatggcatcttgtaacactagagtcaccaccagtatattcactttgatgctttaagaatacaaaatacttccatcaccacaaggacctctcctgttgtcattttgtagcctcacatacttccacttgtattcctcctcaacccctagcaaccactaatttcttggcatcatgaaccagagaatttattcatcactaaatctgttctgccaggatctgccactcttcagccaaaactcctagttactcctgatgacttctaggcatctgccctccttgggcatcaagtttactgccagttgccttctgagtcacctgcagtcaccactggagatgtaattgagtcctcatgtgccaaacttatttggttttcaccttaaaattattttttaaaagactattattcccacattttccctctacacttggtttactaatttgcatgtgtagtttatagggccaagctggcaataagttactgttatactcctctctttatttcccgaatctcctattcatgttccagtttaaactcagctgggaacaccttgtctcattcagaacttaatcacagtctttagatatagtcttttttgttttctttatatgcttattattaacatgtagtatccagtatctaatccagtaacagtcacaaattggcccatcagtggcaagaaatttaaaaaatggacactatagtgaggactaaattcaaaaatgacagccaaactggattttctcaagcacattctgctaatttgtattacgtttaaagagaaaaaattacttttgggtaattgaacatctatatcgcaattgcaatggtggttacacgaatctatgcaactggtaaaacctgtttataacaaaaaaaaagtacataaaaactagttaaatcagaataaaatctgtagtttagttaattttattgtgacaatgccaattttctggctttcatgattgtaccgtatcgtgtagaatgttattattggaggaaacgggggaaggttacataggaactcaactgtattagtccattcttacattgttgtaaagaaatattgagactgggtaaattataaagaaaagaggcttaattggctcatagttccacaggcaggtgaaactgtaatcattgcacaataaaaatttaatttaaaagattatatgtcaagcatgatgaatgggtccttgcactatcaaaatttatacctcagagttgatttttttggtctcaaaatgatataaaatttctaaactaatgttaacacatgtagggagagaaacaagcatgcaattggaaactccctcctcagtggatgaagaggaatcatggtgctagcatctgctcagtttctggagaggcttcgggaaactgtcaatcatggcggaaggtgaaggggaagcaggtgcttctgatgattggactaacaggaagagagtaagggggaggtgccccacactttaaacaatcacatcacgtgagaactcactatcgcgaccaaggaggatcttgctaaaccattagaaagcacccatatgtggctgggcgccgtggctcaagcctgtaattctagcactttgggaggctgaggcaagtggatcacttgaggtcaggagttcagggccagcctgacttacatggtgaaaccccatctctactaaaaataccaaaaaattagccgggtgtggtggcacgcccctgtaatctcagctactccagaggctgagacaagagaatcgcttgaacccgggaagcggatgtttcagtaagccggaatcatgccactgcactccagccctggaaacagagtcagactctgtaagaaaagaaaggaaaggataggagaggggaggggtggggggcagggagaagaaaggggggaggggaggggaggggaagggagggggataggagaggggaggggaggaaggggagggggaagaagggggaggggaagggggaggggagggggaggggaggggaggggaggagggggaggggaggagggggagggggaggggacgggaggggaggggagggggacggggagaagaaagtggggaggggagggcaagggcaaagaaacctcccatatcatccaatcacctcccactaggtcccacctccaacgctgggaattacaattccatatgagatttgggcagggatacatatccaaactgtatcatcaactatttttgcaactactatgtgagtctaaaattatttcaaattaaaaaataaaggcaaaacccatcaaacttacagattattatgtgatttaaagttcctatctctctcattctgtatgtgtgtgtatacattacacgtatatatctcagatagctaaatgcatgtgcttgtttgacatacaggtgtgttgctgttgttttttttttttttaaatttttatatattttttaatttgttgagatcacccaaggtgaaatgcagtgacacgatctggactcactgcaacctccgcctcctgggctcaagcaattctcatgcctcagcctcctgagtagctgggatcacaggtgtgtgctaccacgcctggctaatttttgcctttttagtagagacagggtttcaccatgttggccaggacggtctggaatgcctgacctcaagtgatccacctgcctcagcatcccaaagtgctgggtgccaccgtgcccagcctgacatcgtttttatggatttcaaaatataaatgtatttacattgtttgaaagttcatagtgtatataaaattgaagataggatcctgagatacgtatgaaagcattataatgcacaggtgtttgtgtgaaacatagattgtatctgaggagaaagaaatgacagtagaatactaatatcaaaaatatataaataagatgataggatcccaaagtataattttgtttgctttttagactaacaaaatattaccacatctaaataaatgaaaaacatgaatgacatatgctttttccatcgatttaatttttgttaacaaatataaaatgttttagaattttacttatagaattcaaaaatgtttccttcatatttataataatacttaaatatggaaatgaatacatcatctcaaataacactgagttcattcttggaatgtctttttttttttctgttagagattttctttcattttctttttatttttccccaggatgctatcatgcctacgtttctcctggttagtttcacaggatattttccaaagagaacttgaataaaacagacttgattaccactgttttattctcaaaataagctaatggctattaagacttgttccttgatttgagggggctttttggtatacttattcaaaaaggcagattcaaaataagctctctacttctttattcctcagaatctctgtttgtatgtaattggctaacaaaacccattgcttattagctttgtctcagtgctaaaaaaaaaaaaaaaagtccttaaaattattgcaaacctgcatctgtcacacctgattactccaggaggaaaaacaaaacaaaacagaacagaaaaaaaaaaaaacaaaaaaaagaaaaaaaaaaacttgctttggataacattttatgacaatagctttgcatcaggggacttacttatcttcaatgtgtgctctattcctcatgtcactctttcttccccttaattgaggaaaatgtgttcagaagttaaagttgtggccatctatttaaagttttatattattcagcttagaaaacaaataaaattttcatacgtacaagggaatatagcatcactcaagtaatgcccatcacattgcacaagaagtggataatctttcattacaaaagaaaagatggaaactgcatagatcttctgtaaatcagaagctgtataaccagctacttaactcaaattctaaaagccacctaatgtttgtatgtggatgacaccaatataacaaacatattgcttcaattaagtcaattatgttaatttgttgaaaagaatctgttaactgaatcattcagtatcccttaaacaaaacatagggtgataattttgcaaattattatttcaacttattgagttggcaacgtatgaacaaaaggcaacctgcatctatgttttaggataagtaattaggttctcacagactgagattttcatttaaaaagatttcccttttggacagtttataaagtgaattggaagagagactggaagcagggagagcattctaagagctctcaggggagaaggagggtttggccaaatacagtggccagactcgtgaaaagccgttactggagaggcaggacctccagcacctgggacattgtgaatgtgagtgaggaagaacaagagccatggacatgacagagattctggctggagaactaggaggatggcagcatcagcaaatggtgtgggtggaaaatagaaaataaacacagttttgatgataaaaaggcattttgttaacatcttgtagccattcaaataaagatgtttaatagaaagttggaaattcaggcctagatctcaaaatccaacttagggctggagatgtggatatgggaatcagtctccaatatttagatgggaatgagacctcgtagaaggaggttgagttgaaaaagtcagccgttcttgtccaagaatacaaatgggatcacagtctcatggagaagaaggcattacaagaataccaactgcaccaaaaaggttccttagggttaaaactaataaagaaggcttagatttcactttattagtgcagaagactaattgtagcacagtagaagagagatggaaatgagcttctatccttgaaagtttggatatgaaattgtctcttcaagaagtttgggaggtcaatacaaaataatgcaatattgtaactgaagaagtgagttggaaaggtgagttagttaaaagacatttggtggagtttgttttctttattttttctctgaaatcaagactttaggcttgtttcattaaaagagttgaggccgagagagatgttaaggaatacaggggcaccgtagaggtatagctaatggaacaagggagaatagagttagatgagaagatgggattaaacagcccgagtaggatttgtcccctgttagactgtagaagaaggccagttgggtagtagactgtggctagaccacactttattaatccgtttgtcagtaaatacacatttgagatatttctagattagactgattatgcataaagctaccaggctctcaggaggtcagaaaataaatctaggtagtgaaggaaacagataataacaaaataacaggaataagcaaaatattcctgttgaacttacatttgaagacaaaaaagcagatgatgtcacttgtgagaaagtagcgagaacagcatgacctttaataatccatagaagaagaagaaaaatccaatgaagataaaggagaagcaatcacagatcaaatagacatatgcaaaataagatatgttcttttttttttttttttttttttgagacggagtctcgctctgtcgcccaggctggagggcagtggtgcgatctcggctcactgcaagctccgcctctcgggttcacgccattctcccgtctcagcctcgcgagtagctgggaccacaggcacccgccaccacgcccagctaattttttgtatttttagtagagacgggatttcaccatgttagccaggatggtctccatctcctgacctcatgatccacccgcctcggcctcccaaagtgctggaattacaggcgtgagccactgcgccgggcctaagatacattcttgagtgagaaagattccaggagaagatgactaagggagatattcaagaagaattttaaaaaagattatttcattatcatcagttacctcattatcatcagtgatttttctgatttgatttgaaagaagaaacagcaacgaacaaattgctaaagtttaagagagcatggaagaggagggaaaaactgagcaaacaccatctattagagaagttttgcagtgaaagggaatagaaaaccagacagtacaaatggagaaacataatgtaaaaagggttttttttttttcttcccaggaaagatgaaatccaaatatattggaaaaaatggcttctgtagacccaagaattgtcacttattttagctcttctatattttgaagaaacattacctggtattaatcatccaatagataataaaaatggaagcatatgaaattgaggaagagtaaaattgttaatgctcaaatcagacattacatttagtattagaattattaatatttcatggcataaatttatccaactaaagaatttcacattttgaaaaagataaaattgaaagatggtaatttaccttgctatcacaaataattctcacattaactaaaacttgataattttgttgattgtatgcttataaaaagctcttggttccacattcagaaaaatattttatcccaagtactttccaaagagtatatcatcatatttgctgccattaatacttaacaaatacctgcgaaaagcaatggttttggagggtaacctgagggcagtataatctatctgttcttctagatactgtaaacaatttctagagtaagcttgtcagtagggagctgaatatctatctgcatcaaaagtgttggttactgctataaatttgtgtttactgagctgaggtttggcatttttccatggggctacattgaggaaaactgtaatgtatttcctatgaaatttgttgctgtttttatatggattttcttgaacacttcattctttatgtagcatagtttcttttatgtgaggatttgggaagtttctttctgggctcagtaccttgagtattatgcttctgcaagcaactggttagattttatttaagatgagccttgaaactaattctgtctgcatttatgtgatatgccagaaattttaaagccaaatttttagacaccctcctatgcaacaattgtttttggtttttcatatttttatcaagctagtacatagataagtatttttaatcaatttgtagagaaataagttcatttaacggtaaagttctttttccccaatatcttcttatttcctgttccactctccctttatacttttatatcaatttgttcgcttataaatgtagaatttgcctattggttaatgacttcttgggtcaattactagttagctgacttacttttccacacatctgactacttttagaagttatattaaggccaggcatgatgattcatgtctgtaatcctagcactttaagaggccaaggtgggaggattgcttgagcccaggggtttgaggctgcagtgagctgtgattacaccactgcacttcagcctgggctacagcgcaagaccctgcctcaaaaaatatatataatagatatttttaattctctattggttaattttattacatttaataatatacttacaaataggtctactcttctgtcaaattttggtaatataatttgactcttcacttggaagatgagtatattatttaccacattatttcttctacattttcgtatccatttctacctccaaacctctgcttcttaggttgtattttaacattgccaagattgataatgttagatttgtatttctgtttgtctaaatatttatttaacatatcacaaaatggatagcatttatctaattattttcatcctttcttatggcttgacatgaaggataaagaaaaaattataggaggtttggaaagaaaaataatatatttgagtaaaatttaaaatagatttctgatgctatattagattatcatctgaaaaaatttatttgtcaatatcttagaaattcaaatatgcatccattatataatccagaaattcttctcctaggcatttgtaacaaatgctcacagcaattttatttgtaatagtaaaaaaacctggaaacatcccagtatctatcaatacaaaaatgggtacaggttatagtaaacttagacaatgaaatagtacacagaaaaatagaaatgtgctactgataataacgatatgagggaatcttaacaaaattgttctgagtgaaagaagccagtgatgtttgattactttattatgaagttcaagaaaagtcacaattggctgggtgcagaggcccatgcctgtaatcccagcactttgggaggccaagctgggcagatcacttgaggtcaggagttccagaccagcctgggcaatgtggtgaaacctcatctctactaaaaatacaaaaattagccgggcgtggtggcctgtgcctgtagtcccagctactcaggaggctgaggtggaagaatcacttgaacctgggagatggaggtttctgtgagttgagaccatgccactgcattccagcccggacaacagaaaaagactctgtcaaaacaaaaggcaaaattaactatggttatagaaatcagaaaagtgtatacacacggtgaggagtggcattaattgaaaagaatattgactgaggggattgatgagactaatttctgggataataaaatgttctatatcttgatagggagtgagggtcacgtgagtgatcacatttctcaaaactaatcaaactattcactggttttcagtttactgtattaaaaattattatcattctttttaaaaaaatgacgtattgctccctgaacagtctgcagtttcactgagagatcaaatagtaaacattataattttactattcattataaaatgtattatgatataggtaagcacagaatttcagaatgagcatcaagtaaccccactatgcatttatcaaatctgtttcactttccttctgtggcacatattccagtctcttggacactaaggttaagatcaatatgatacatgaccaatggaatgtatgcagaagtgatattttcttcatcaaatctggccataaatcctaagttcattcctatatgtttgtcttctgtttctgtggtggacttgagaatcagatgttgatgacaaaaaccaaatgaagtgagcccggatccctgaatgactatgtggaacagtgctcctctgtccttttctttctatactgaaatgtgatgtgggcaaaaatcaatcatgtattatagtaaaacgctggaaagaaggaaacaagaaaggaggggaggaaggaaataaagaagaaaagaaagatggaaggaaggaaagaaagagagaaaaaaaggagagagaaaaaggaaggaagttggagagaaggaagaagagggagtcagagagtaagaaaagaattgatggttcttctgccagtgacttagactggagataaataaactatgggaggcaataaagccattaaaaagacagtccacttgttgagtaggctgagaacaaatgatcacaaagaaggaaacctattgaataccatcatcatgtgatgcccctaaagaataaagagaaggaatcaagaatcagatttttaagattttactttattaattttcaaagtcaaattattgcttgcaaaataatgctgttcttaatgcttctagtacgattattctaaaatgctttcacaacattgacaacattaagaagacaagatgtatttatttgggtaaagagcagtagggtctagagaggatattgctgcatatatatatatgtatatatatatatatatatatatatatatatatatatatatatggaatatgttggcatgtctcacaatgtttgacatgattttgcaataaaaaagagtgtatttttagcatagttcaagtgaattacccaagtgaacaagctaaatttgattggggtggggggttaatttttacatctctcctggcagttctctcaagatttttccatgattgttttctttttatcccatgatctctgacatctagccacattacataattataacgacatccccctacaactaggaaacccttacacattaccctggtgtctttttgagtcagtctagcatgctctattttttttcctgtaagatattatcaaatatatggtttttaactaccaatggtaatagaactggtttttgtacatccagaaataacaagacctatgaaatgtagatagatgggaatttggaaatgcacatttatattcatttacttaagcacatttattgaccactgaacactgtggtcatcagatacacagggaccaaagaggtatggtctgaaacctcacagctgacttacatacttctgaatcagttagggagttaatcaaaaacataatgaagtaatcacaattgagtgaagaggggaaaaaaaaaaaaaaaacacaggatgctcttgatacaggcaaactcccaaattggggcttagccaggagagttattggcttcatacaggaaagaactcaagagtacaccaacagaataaagtgcaagcaaagcaagtttattagagtaacagagtagggaaaaacggctgctccatagacagagcaggacatatgcagagtagcacttgtagattgctggctagctatatttatagctactccttaattatatgctaaataagggccaggtaattcatgaattttctagaaaaggagtggggacttcctggaaccaaggattcctctctttttataccatgtaaggtaatttccgggcattgccatgccatctgtaaactgtcttggtgctggcaggagtgccttttagcaagctaatgaaatataatttgtggataacaaacaatgaggacaactagaggttgctttctttgccgtcttcgttttagcttgtttattttctgcatttgaaacaggagttttcccttttcctcttcacagggcaagtgataggggtgtggctcacttcttcagtgctcccctgctcaaacccatagggagagcgtgcagatgggcatgtcatggagctcaaaccccatggcggtgtctagggtttagtgtttacagctcctgaagccctagtgggtgtgtgttaccttgtgctctcttagttttgccatctgcaggtggcttgtgttaatcggttcaattagaccccctgccttactgcaaggacagagagctttctgtaccctgggttcttgccttggtgtatcagaaaaatcggatcacatgtggtcttcaagaatgggtgtaaggttttactgaatggaggcgggtctcagcgaggtggatggggaggtcagaagggggatggagtgggaagctggtcctcccctggagctgggccacccagctgccagactctcctccagcgtcccttggctgaatccggtgtgcttttccactcctctgctcctctcgatgtccagacacttgtggctgtgtccactagggtctcagggtttttgtaggcacaggatgaagggtgtggagggccagagtggtcttagaaaatgcaacatttgagcgcaaaaacagaaatgcctgtctgcacttagttccgtgggcacaggccccagggtggagccccaccaggaccctgcccttctctatccagcacttctctgccctcctcccatatcgcattctgttttgaccagatcctgctttaatcagtagagtcctgactggtgctcagaaaaaaagtcctgctgatctcctactatgaggcaccctatggaacgaggggattgaggggtggcgaggcaaggtccctcctgtcaggaagtgctgtctgagctgagtcctacaagatgtggaaggccagccagatgaaactaatgagcagagactccaggggaagaggccagattggaagggtaacaggtgcagtattttatgaaggtccttcttatcttcctgcctcagcagggaatatagctagtcctggaaactcacatcaaggccgcaaaatggaaaatctatttctacattttgacataagttgttagcatggggaaaataaaatctaaaatctggcaagaaataaaatttcaattaaagggaagtgattgtaatgatcacaggtttagtatattaacataaagaatagtcaatatgtgtttcaatgccacagagtcattttatgttttaagcaagtaagatctctcactttagggaacattcacgtcattctcacataagttcccacctatgagacctgttgtcagtagcgaaaagctcttcctagatttagttacacaatagctaattgttttaggcacttttttttagtcttaagtaaaacctttacatgaagatacagagtctcattcattcgctataggagcttgtgatcttttatgttaggtctcctaaaaagtgaggatttagttaggaataaatatacttattctcatcataaaataatttgtgttacacttcaaaccccataatagtaaatttgagaaaaaaaaaatgttagttcatgcatcatacatagcatacttctagtactttatatagtctcctccagtttgataaattatattttccaagtgattacaaaatacttttccaaagtttactggttcttaactgtcaactggctggaaagtcttagacttgtgcatcctgtctaacttgcaagaaagatttaatttcaaagactcttagtccatgggctggcaaactgtagcccatgggacaaatcttgtccacgcctgttcttttaaagtttgtgagctatgaataatttttacatttcacaagtgtattttttaaaaaaaggaagaataataatatgggacagaggagcatgtgacctgcaaagcctaaaatatttactgtctggtactttgcagaaatgctttgcttcactacctcttagaccatctgaaatattgttttagctagaaaaaacagtgcacctagtggaaaattttcagttattaaaacttcagggatgtttattctaaaattaacattgtggatgacttacaatatgttaaaaaagttctaaattttggtatgtatttgtacaatttataagacaagaactctaaaagtagaaccataggtttaacattttattatattgattttaactttccttaacatcaagctttgtgagatacatatatgctatcttaattataataataaaccctattctaagcatatatacaaatcactgcctctaagagagatttaatagccagaacatgaaattcacaagttgttgtaaatggattttttattctttcaatgataaatttggctggcattttttatgtatctgcaaagcacttgtatactatttgtctaaatgaaggtttgattataaagagtattgttctatgcaagaaagattcaactttgctttaagtttttaatttttgatgcaggtttccaaatcttaaagattgtataaaaactcagctgtgtatctttttttccttttcacacctatatgaaaaactgtaaatgagtttttaaaagagccaagtgatatgaaaaaatgctccttttcaagacctatgatagtttattctttactttagtatttactaaataagatgccccctagctgacaaattcttctttccttttaggaaacagtgtcattcaaacttttaaattacttgtattaaaactgcagaggactttgggtgctgataatcacaaaagaagcttgatttaggtaaatgtgtgagaaaacataatattattgattttgtaaaaatttgtagaaataaaaaataaggagagaagtaaaatatgaacactatattagatgtactatctaataaatagaccagatatcaaatgtgtatctaaaaagtgatatgataaaaagcatccatcagactttaaatttgatattcaaatatataacattaaatatcaaaaataaaatatattgtatataaatgggaagatatttatttctagttgacaatttgattctcaaatgaagagagtggaagaacttgttactttgtcccaagtttgtctttactaggtattcgacatccagttttgttttttttttcccttttttttttttttttttttattgagatggagtttcgctcttgttgtccaggccagagtgcagtggtgcgatcttggctcactgcaacctccacctcccaggttcaagtgattctcctgcctcagcctcctgagtagctgggattacaggtgcatgccaccatgcctggctaattttttgtatttttggcagagacggggtttcaccatgttggccaacttctctgagtctgtttcctgatttgaaaaaatagcatccctgacaattttagagttttctttgaggcacaaacaatacagactatactagaaccgtttaaataatagatatatacatgttagacgttgtttttattaaatcaacggctacatctccttttatgtttcctaccttatcaaatactgatatttatggagacatttcacatatatttacagctttgtaatcaagacaatcaatggttcacgcctatggtattcttttgaaatatttaaagcttcagttaggaaaatgtcttaaatctcaatatgcttggatgaaagaagtggaaaaatcacaatctattggcacacacctatagtcctagctactcaggaggctaaggtgggaggatcgtttgatcacaggaattcaagggttacagttagctatgactgtgccactgtactctagcctgggtgatagagccagaccctgtctctaaaaataaaatataacaataaaaataacaacagaagcacaaactattgattttgagaatcctgaagaaaatatatagcatgcatttttccataagtaaagcaaaggcaaaccttaggtaaagcactattattctaaacctcaaatgtccaataacatcttttaattttgctggtgaaatctcaaatgcagtatatctaaatcttcactaattatctttcccttcaaatattgttgtattagtcaatgttatttcagttgctcagaaacaaacaaataaggaaacagatcaaataatccaaaacaccttagcaagctctggatttagatttctcaaatgatgtcatcgcagatgtgcttactttgtctttctctgacttccactcctttgtaatatcaaaatggccaacagaagctcagtgggaagagcacctccattcctgcagttttgtttgttttcttttcactcagcgtgcattggagatcccaaggtgtggtagctgtcctgctgttcttccacaccaatgttccaaacctctcctccctgaacaacctctgaagcacttgtggccatattatttcatctatcattttgtattttacattatgcaatggtcttctactatcttcttgggaatttctctttactcagagagggggattttagtgctttcattgttaaaaattataagatgtataactttcttgcttaaaactctctagtagatttcccttccagcacacataaatgaaatctagagcgtgatcataatgtacaggccctcctcattctgtccttgacctctccatcttctcccctgttcattccttcttcacactcttccaacaatactgacttccttgctacccccacaaacaggcacagtatgctcatgccatttgcctttctggcctttgcataaacgatatatgtaattgtataattataggatttacatataaaaacatatataacaatatgtacatattacatataacatagtgtcagtattgtatgtgtaggtatacatatatgtgtatgtgtgtatgtgtatatatatagacacatattcaggttcaggagtacatgtgaaggtttgttacacaggtaaacactcatgtgacaggggtttgttgtacagattatttcatcacccaggtattaagcccagtacccaatagttatcctttctgctcctctccctccttccaccctccactctccaggagaccccagtgtctgctgtttccttctttgtgtttattagttctcatcatttagctcccacttacaaatgagaacatgtggtatttggttttctgttcctgcatttgtttgctaagtataatagactccagctccatctcattcttttttattgctgcataattttccatggtgtatatgtagcacattttcttcatccaatctgggttgattctatgcctttgctattgtgaatagtgccagagtgaacatttgcatgcatgtgtctttgtggtagaatgatttatattcctctgagtatattccccataatgggattgctgggtcaaatggtagtttttcttttagctctttgaggaatcatcatactgctttccacaatggttaaactaatttccatgctcaccaacagtgtataagtatttccttttctccaaaacctaaatgtaaaacccaaaattataaaaactctggaagacaacctaggcaataccatcctggacataggaatgggcaaagatttcatgccaaagacatgaaaagcaatcataacaaagcaaatattgacaaatgggatctaattaaacctaagagcttctgcacagcaaaagaagctgtcaacagagtataacagacaatctatagaatgggaaaaatatttgcaaactttgcacctgacaaaggtctaatatccagcatcgataaggaacttaaacaaatttacaagagtaaaacaaccctgctaaaaagtgggaaaaggatatgaacagacacttttcaaaagtggccaacaagcctatgaaaaaaagctcactatgtagtttaataatataaatgccatgaaaactgcaactctgtctacattgttgatttgaacaatatctgctacatagaagactctcaaatatctcctgagtgaatgaaaggtgaatgaataaatacgtaagtaaatgtatgaatgaagcattttagcagaagggctaaaactgagtctcattgagttaggtgcccacccctggtggtagggagtagtgtctgcctctctagcatcatatggattaagagtgaatttttttttttttttttttttttttttgagacagagtctggctctgtcacccaggctggagtacagtggcgtgatttcaactccctgaaacccctgcctcctgggttcaagtgattctcctgcctcagccttccaagtagctgggattacaggcgtgcatgaccacacctggctgatttttgtatttttagtagagatagggtatcagcatgttggccagactggtcttgaactcctgacctcaagcgatcagcccaccttggtctcccaaagtgctgtgattacaggtgtgagccactgcgcctggggaagagtagaatattaagagtgaactttttaaagaaaagccagatgctattactcaaagggaagaggttgctgagcagtcgagcaataaatgttcatcatatctttccctctcttcccttttctgtcaccaatgcctgcacactaatatcttggaataggttgattatatcttctactcccttctttcaagatgttaataattcttcttttgaaatatcaaatctgtcttttatttatttattgcccctaccaccacattggtgttgaccttcaattacttgttgctaatcttcttgctcccagtatgatttcccattaccctggatctcattaatatggcttttattgttatttcttaacaacaagaacaacaacaacaatacatgctatattattttgtctctaatcagacagaacctgttaaaagatttatgatttttttcaacataactactttctgccagtcagacttgtgtctttattcctattccttgtgtattcctgaacacccttggttcatgtttcccgagaatctacaatcttagttcaaaaattcattttaccaataagcgcatcaaatctttttgtgagagacatacaggggaaaggaaaagtattttttttaagtcctagagaggctacccatacaaagcaaaatttcagcataactatccctggactctgggtcttataccctaggtctgaaatcctcctttatgccaacctattcttcaatatatcctagcccctttctctcttgtctttcaaacaccactctgtccttctatgcagctgagctctaactctgtagaatttgcctgattacatagccttcagggaactccaaatatcggtaaaattactagttacgtaatgcacttccatagttccttttaatgctgccttttgcaatatctttttagattttattttaggcctcataagactgcagatgtcttagagacagtgtttcaggagagatttttgttgtttttctaaatattgacataaaacctagcaacatgctaagcatatagttaattttcaagttgaaattgtttggtggcttttgttgagtattatttaagatcataaattttggattaacccatatccaattgtagatttaattcaagtgattttggtcaaggattctaattgttcttgcatttgaagccagagaacccaatagagatctgaaaatatagccatggtttaatggaatgcttgtttagatttttagattctttgtaaaactaacagctggctagaaaagtacctacaaagaaaatgtctttttagaaattgtttttctgatgaaattttgtcaacaagatgcaatgaggatgctctattaagtgttaaaattcaagacatactgctcaaatagttttgttttatggattacagaagtgtatggctatttttaaaaggcagtggtagtacgcagctcatttgagaaaaccaagaagagcacagcaggaatcgtcacagaagaacatcccaatttttaaaacatgtaattgtccatgttatagactaaatattatccattatgtggattgctggtaccatctaaaggttacataaaattgtttcaatgcggaggaaatctttcagtatacttctcataattactaggccttacattacacattttgtatttcggagcgcaggaatttgaccggggaatgcgggttggataacagatctactacaaacttgcatttgtgttgcttggatgaacttaagccagtgctttcaattccgaagctactctgtatttttttttaattaaaaacatctctcgctctttactttgtatgagtagtctaactttaaaacatcattattaaagataatttttttaaaagacaaaactcctggttttagatagaagcaaattcagtccttaggcaaagaagacaacatactaacaatgtaatataatgcctgtgttgcatcttttcatgatttaaaaaataatttttaaaatttctatttgtatgattttaagataatttaaatctgaaagttaatatcttctaaaagataaggctaaaacctcaagttatctattatagggacatttagaatgcatatttgtatgattttaagataatttaaataaatcgaaaagagaatatcttctaaaagataatgctaaagcctcaacttgtctattatagggacatttagaatgcatatatgaagctgaaactgctcatgtttaaaatagcacaagctttcatttatttgaattatatcttctaaaatataatagtttctttctttaaatcttccttgaattataactttatactgacattttctttttcattagatggtaattttttgagagtcgagtctatggtttcacacatccttgaatatcccatattatcttgctctaacttatgaaatagatagtttgtaaatccttgttgaatgatcgttatgtatgcctcccaaaaaatccatttgttctccgctgagaggaaaaaaataaaaaataaaattaaaaaaaaagacaatgtgaactttcagtatcagataaaaattcatggataattattcttttgacagaatcttctataatgaaaaaaactgaattaacatgtttctgatccattgaacaaattctctaaatgtgtctactccaataaaaggtagaaaaccctgacctcttcacaacgtgttcaattgttcttcttctctcactaatgttgaaatgttatctttaaatttctaatggttttatgggagaaaatgtggaggagaattttagagagcaagacatatggttagatgctataaaaatcatttattgtataaattaaatgcaaaatattagaactcatttcaatgtgtatggaacacaacagtggatgccatttagtctttcattcttttaacgtatgtttacatggatgaaaagacccacagaaaatctgacctgttttccacttaaaactggacctattttcacattaagagtaaggaagcagctttcttcaaattatttacggtgtaagaaatcacaagccctaccattggatgacatttgtgtttattctagtagacagaggacatgattgtttctaaagtatttttcccaatttttaaaatactatttccttttccaggcatttcccggaaacattaactctgacggtgtggtccggcacgaattacagcatccgattattgcccgctatgtgcgcatagtgcctctggattggaatggagaaggtcgcattggactcagaattgaagtttatggctgttcttactgtgagtatcgtattgtttaaatttgtggcaggttttatctttatttaaatagtaagctgttttattttaaattatttaacattacttgctttctctgacaataaactaccttctcatttacatatatatgtatctatgcatagatacatatatatataataaaaggttgtgtctctatttgcatgttataaatgtatattataaacacgtacagagactgacatgtcatatatcttaattatactttaggttgaagatttggaaaggttttttttgttcaatagactaaataataaagcttattaataaaattgccttgccttatgaaatatttaaaaaggggaaacctatattgttatctatgtatttgggtctttattatgggttttgaaaacatttcgaagaacttccttcgggttcactaagtatctctcttcagttatgcctattcctatactaaagccaatcactgggttttaaagtcaatgacgctttctctaccaaatttaatttattttttcaaattgatttggtcatctaaagaggttattttcccttaaatatattttaaagctcccttgttatttcttaaatacattatgcatatatctaaggattccaacatatgaatttgggggattataattcttctgtctattgttgctgctaatttttgcaaatggtacttgttttctcctactcctcttcctctctctttttcttcttatcttgtttgcctgtctgtcctttttatccttatccttatgcttatccatattctttactgtgacctcaatttctttaaaattttatctgtggaaatttgtttgggccaaggttgatggtgaattcttcttgagaggatatatctttgcttatttgcttctgtgaaggcgataccaacacagaactgctttcaagattatctccagttgtggttgttgtttctttatgagactgctagatagtataaatttaatctacgaacacgtgatttgcaaacattggcttcaaaatatgaattccctagtaaaatatactttcctcattcccggaaatttttcttccagctgttacaattccctgggggaacaaagatgctgggtatgaacaaggaggggatttggtttctctatgttatgcaaaaagtctcttattagcccgtttcctactcattcctataaacccacaaaaatgagttcacactaagcagaaaatttcaaatgcccccgttggacaagctttctaaaatgccctagacacttagtattttatataaaagaatatatgaagctttcacctctgtacacatttagtaacagaaattggtcaaaatattagctataatagtgcccgaatactgtcttattaattcataggcaatagtgttatgtgcaaactacaataaaggggtcatggaggtcatttaaaaattctcaaaaactgtttatttggttaccattttattgtagcagataaaattagtagagagacaaaagatttagctcttcaggagaatgtagctctttaaaaggaaaatttagcatttctggtaaggcccaaaaagaggtctaacataaattagaatctttggtcctatgtggtctagacattcatgaacagagtgtcatgttcacacatagtcttgctctcagcatagcatcatgacgggaaggccagaagaaaatgtgatatttttgtgaccatcacaaattttgttaagagccatgtttaacttttagtaaataaatacagacacacacacacatatatataggtatatatacacacacatatacatacacacacacacatatacgtgcatatatatatatataatccttcatggagactacgtgtatgtgcaatttattttattagcaattatttaatgagcacttttcatgtgtgataaatatattaaatggtagcattaccacagtagatgagaaagacatggtctttgtgagatgaagtgggacaaataatttaatagagttaataataataaaaatagtaaaagttaaaatttacccaaaagcacatagcctgagtgataggtctgaaagggaacccaggtagtctggtacagtgccaaagctcactatcaccgttctgtttttaatcccagcaaaataagcacccacctgaccgtccacagtttaatcaaaacatcatgtcaacaccccgcaaccactgagtaggccttctcccagttactgcaactccttaaacataaaaattcacctgatttgtatcaccaaagattagttcttgtttttcaaaaaaatttcacacagatggagtcataaaagatgcattattttacacttgacttctttagttacaaatcatatttctgagaattatctgtgctgatattagagatattagtttcttttcctcagtattattctatcttgtgaatattctacaatcatttgtttatttcatgctgatgaacgtttgagttgtttctagatgttggctatttatacagaattactaaaaatgtttccaatgggtatagacttgggggggtaataacaaactagcatatatgtgtgttcacctttggccaataacaacacaaatttttctaatttggttatatcaatttaaagtctccaatgcaattaactggagttcctgatgcttacaaattaagatatttagtattgtttaaaagtttaggccgggcgcggtggctcacacctgtaatcccagcactttgggaggccaaggagggcggatcacgaggtcaggagatcgagaccatcctggataacacggtgaaaccccgtctctactaaaaatacaaaacaaaattaactgggcattgtggcgggcgcctgtagtcccagctactcaggaggctgaagcaggagaatggcgtgaacccgggaggtggagcttgcagtgagccaagattgcaccactgtactccaacctgggcgacagagccagactccgtgtcaaaaaaaaaaaaaaaaaaagtgtagccattctggtgagtgtttgtcatgtctcattttagttaagttatgtttctttttttttttttttttttttgagacgtagtctcgatttgccacccaggctggagtgcagttgtgcaatcttggctcactgcatgctctgcctcccgggttcatgccattgtcctgcctcagcctcccgagtagctgggactacaggtgaccaccaccacgcccggctaatttttttttttttttttttgtatttttactagagatggggtttcaccatattagccaggatggtcttgatttgctgacctcatgatccgcccacctgggcttgtttctgatttttgaaagaggttatgcttattggtcatacgtataccttttttttaagtgttcaagaatcttgctcatatttctatggattcccatttatctatctatttatatatctatcatctatatagcaatcatctgtttgattgttttaagtagtttttgcaggcaactcttcttcattctcattacaattgctagacacgtatttatttttgaggtgacatttttttaacaataataattttaaagcaaacattgtcaatgaagttacttaagatccacaggtgtagacttaaactgtgaccacatgttctgtaattgttacaagtagatttataaagttgtgagtttgtgctgtcatgggcttttccatcaagcctgggctttgacaattacaagacaagaaggaaaaataactgaagcaaatcaggaagcgagacttttccactgtataagtccctttgggggaaaatcatatagctttgggaaactgtattaacatttatatcaatagatgccagtggagtaagtaacttagcaacacaaaatttaaaaagtagcatttcagttggatgtagtaggttgggtaatggcctatcataacataaagcctttattcttggaagttgtaagcatataagtatttgcagatgtgactaagttaacaatcatgacacggagagacaatttttttttttttttttttttttttgagatggagtctcgctctgttgctcaggctggagtgcagtggcgtgatctcggctcactgcaagctctgcctcccgggttcacgccattctcctggggagaggcaattttacattagccaggtgggccctaagtgcaatcacatgtgtcattgtaaaaggtagacagggagagatttcacagatgggaaagaaggagagaatgtgaacaccttggaaccagaggctgtagtgatatggcgataagccaaggaaggccagcagctcaaaaggcagatttttctctggagggaatgtgatcttgccaacacatcgatttcactcagtgatgctgctttggaacttctgacctccgaagttgtgaaagaacaaatttctgttattttaagccactaagtttgggataatctgttatagcaacaacatgaaactaatacaagagtcaatatattttagaaaagaaaagacaaaaatcggcctgagcaatgttctctgatagaactttctacaaagatgtagatgttgtcaatatgctctagccactaaccatatgtggctactagcatgtgaaatatagctaagacaactgtggaaccaaatttttaatttaatttaatttttaattcatttaaattcaaatttaaataatgtgactactggctaccatattagacagtgcagcttagaggaaccaaaacatcatgtatgtttttcatgtctttttataacataaaggacctataaaagttatgttttaagtgtcagtctctattgttttttcttagtttggaaaacaaaaatttaatcatcctgaaaactgtctttactgtcaataatgtaataaccagtcatcttactaaccacacagtcttagtctgttttgtgttactataacagaatatctgagactgggtaatctagaaagaacacaggtgtatttcttaccgttctggaggctggggagctcaaggtcaagggacctgcatctggcgaaggccttcttttcccattgtctcataacaggaaacagagccctcgtgacctactcatgtcttaaaagtcccacctctcaacactgttgcattggggattaagtttccaaaacatgaactttgaaggacgcattcataccacagcgtacaccaaatgtccagataagattctttttcatttattatttttgaagaatgaaaattacacttatctcttttccaagaaaaatatacatgtttacattttaaaatatatatatgttaaacatatttgttacgaaacactttccaaaagttacttccaaaaatttactggctaatgtaaattttctatactagagttcaaactagaatgagtccttagaagatgatactctgttcttgagcttagtgaactgttgtctcaagagctttctttggatttttcaatgagaaaaggaatcatataactttgagtggggaatgtagattagacacagccccccattttggcttcctagagaatagcagtgctgtgtactctagggtctcagcaaggagaaacatagttttgatcctgcccgtggaagagagatgaattctctaatctgtctggaaactcctgaaagggtgtacctgggatctatcttaaacctgcaagagagggaatggggcttctttcactgcaaagtttgccagaaaactagagagagagagagaaatcacaatgtgagcactgtttctgtttgactgtgtgtctggtgcaactccccttgtgtttgtcatctttcctttgtgcagttcctccatgatcactttgtcatctgagaaatgaggtacttctcaaggctgaaataagacgctgactctattccaggtggagaatttcgttccaggccactgctctgaagcctttagggcttctattgttcctacttcctgacttgtcttgaatataatatgaattccaatttcaataaatctaaactcatttgaaatcattctgcttcctctacgtttggttttccctcaagtttagttgaaacaagtgcatgcagttatttttaaaacttagcaatatgtcccatgccttttgattcagtgagctttctcccacagcgcagacactaatcttcttacgcgataccagtgggacttcataaagcaaaaggaagaggtctcagattaataatttcaaaaaatcatttatggctgcattactcaaacattcattttaaaaagccaaacacagtgcactgattaaagtactgagcgtttttgatggcaaatacttaattagtttttagtcagagtcctcttaaaagtaaggacggcaccttgggaaaccaaggtacacacatcgaaactaatttttatataggcttttaatttggatgaataaataataaaacctgtatgtcattcaatgcaaatcgtgatggaaaactgtcttgctgcctgagaaaaaaagaaaacatatcaggagaagttaaatacaaataagtaaaagacagtgtttggtcattttcatgctgtgttgatggcacgtctgcatctctagtgagaataccctcttctagggtcacacactaactcccctcactctcattcttcccaggcaagagatgctgccatgtacagatgtgttagtttcctggggtctctgtaaaacagttctgcaatcttaagatgaaatttaagacgatggaaaggtattctatcatggatctagagggcacagtctgaagtcaaggtgttagcaagggtagttccttctggaagcttggagagagaaacagttccatgtccctcgcccatctcctggtggtggccagaagtccttgatgttctttggctcattgctgcctcatttcaatctctcctttgggttcacattcacatgaacttcttcgcttttgtctgtgtctctgtgtcttcaaatagtcttcttctaaggacatcggttattggaattaggatctaccctaaaccaggatgaccttatcttaacaagctatatccacaaagacccacttttgaaataaggccacgctttgaggttttggctggacatggacttttggaaacactattaaacacaatattatatatacatatatatgtatatatatatatatatataaatcattaagaatttatgtttacatcagtttaagtgagcaaaaaataaaaaatcagttctggaagtcaacctgtgtgttcctacttaaattagatgtttaattttgtatcatacagaagcatcccagatacttatattttgtgtttataatttcttcaatttattcagtgaacctgtatcgcattcaggcatttagaaacaacctaaagcatgaactctgccctcaaggagatgaatttttggcagaataaatgaataagttaatagtttaaatactctatgataaatgctatgacagagaagcaagcctcgcctatgttgattaatgaaataaggtttcactaagaagcaacagaaattaggggtaaaggagcattcaagacaagaactaacattttcaaagactaagagacacagaggtaagaacataatttatttcatatttggagtttttagttagcaacataagtctcatttcagtgtacaaaaatatacaaattattatgttgcttagaggatcaatatatttgtgacagatttgttaatcttattaatattaataagaataaaaacattgaattatactattttaaaggcattttgctaattttaaatcttaagtgcaaatctgaccatattacatctgggctgactacacgttaatgatgctacattgcctataaagtccaagctgtttgtttgaaatttaatttctgcccacccactgactacctctgtagtcttaaatccagtcatattgtgttttatgctccaaatatgaatacaagctatatttcctaatacatgagtgacctgcttgtttaacaggcagtcattggagatactttctctaaccaaaatagcctctccatcatcctttacctgaccaatcttttttatctttcaagattcagttgaaatgcagtctttaatgagaatcatctgaatttccacaatgagtcatgtgtttattttcatatgaatatttatcagatatcatataccattatattacataaatatttccaatggaatatttaacaaaataattcaaaataaagtcaactgcaagatactgggaggaggagacagcaagtgtcaccttattcatcactagcatccccttaaatggcaggctccctgtacacaataaatgtttgctgaaatgaactgacatcaaatgtaaatgatacaggcgtaatttattccctcagtgaaaactgattactatttgaggatgcatagattcttttattggtggaacagggcatgattatattgtatcatattgaacagtgctctaaggggcctacaaaatattgaaataattaccaaactaaatataataatagatgttcaaacagagctatagacagcaaataactcagtgtttttttctaatttaaatatttgtataacttgtattattatttctggttattattttaaatcacacttttttgaggctgcttcatgggttatgtatatggattgcttatcagaggaaaaaaaaccacccaagatccagagtaatgtgaaaataaaagtaacttaacataaaaatagatttaataaatatcactgccaagttatacaagataaactgataattaatgaggtaattaaaattgtcatgtgctgtatgacatatttgggatatgctatgtttctaagttttcatgttattagatttaaaaaaaatactgtaagttgtaaccagagatgttcttgccattaagagatctggaacttagatttgagcacatgtagtattctttagtgcttttaagtatagtttgggtttcaaactagaattggagtgctttgtaatagacagctgtggattgtcattcagtgtcagtttgagataatgacttcctggtctgtacatataaatattattgtagggataaggctaatgatgaaagtgcacatgatagatactttcacataatttgggtataagccttttttgcaggggttggctaaggtagatagctagtggatcagatactcagtggatctcattcctgggttaccatttgagggtgacatttgaaatgaacaaatttaaagcatggaaatatatgttctaattttttattctatggggaaacagctatcagtatttaattgttttttttctagtgtaatttgtttacttggaagaaacttacaattgactttgttcagtgagagaacatggtgagcctacctttatatttaggaacaagacagttacaattggcagctagcttatattttggagaactatttaatatgtcactgatatagagctagagtcacatcatattactgtaaaatctaaatttaaatttactctcaagaactttcaaagttaaactgacatataaaatcaagagtgtcgatttaaaagcaaattaaaatttctggcagagagtaatatgcaattagacctatgtctgtcactctgaaatatgaataacagtatactttctagaataagggagggtataacttttattatacatattagtccaaaatttttcataaaataatttcccaagaaatgtaaacatattaaaacaaaagtatatatacacattttggtgcctggttaaagagaagaataaagtaatgaaaaagaactatgtttcactgtggtttataaataagatattttgattactacaaagaggagccatatgtgtactctataagaacttcaaagctgaaaagttcccaagagaccatccagcccaatcctctattttactaacgaggaaaccaaaacccacagagttatgcgacttgcataagcgaattaatcgcagacctagaaatcctgcataacaatctagagcatagcttcctctctgacatttaatacctctctcctctggttcattcttctttgtttcttcttcacccgtaagggctttttataatcttagtgatggcctacagaaaatacaattttgtgaattctaatgaccatagaaatgctttggcctatcaattatcaccgtaagaatatataggagatatccagtaagaaaagtatctcactagtactgtgcattctacatgtccagcagaaaaatttaaatgactaatcttcataatgtactcattggagaacagcttgcaaataaacataactcaagctttaattgcattttggtgcagaaagtttatcaatatcagttagtgtattttctcaggtaatcttacctcctgagatacgttaactactttttatatatatgttaatttttatttatgatagatgattgcagagagtactagagcctaaattacagttatacagtccatcaacatttcacttataatccgtttaatgtaaggaaagcaataaaatttaaaatgctgcaaatatatataagtgattcctttattagcttttattcttatgttgttagttttcattatcacctatttaaattagctagggagagaagagcaaatatttaagatggcagtaattgtcctcatgaattaaaagtaacaacataataaaataattatttagtatgcacactttaaaaatttcaagcaatttaaattacttgaattagaaatcagtgattttcagagattaaatattcttactcctatcagaatagtatcagatcttttatagttagacttgaaaagaagtaatccagattttcaatttgagatttttatattttctatgcttctaaatgaagcatgtatatttttctcacatgctcaaaatactgtcatattaggtttttcacctttcatgctcgtttggctggacaggaggagttaaagaaactgtcagtgttctcttttattaccaattaatgggggaataatctcaagaattaaagaaagcattcaacccgtaccaatcattttgtaaacatctgaatactctaccctcaggcacccccaaataataatatttgctaggaaaaaagtccttatttatggaatgtttttagcaagatatccctgtgttaggttgcttatggtaaacacttagcaactttagatttatgatcacggctctatggaaaatcacttatcagctagatgaccatggaggaatgaaatggagatgcttcataaccgaaatgcttctgcgtgaggcaataaactgcatagcttattaaggactgtccctattactctaggccagagagcacatgtctgatgaaagaagaaaaagcctgaggaactatgcagtgtgtatcagatcccaccttgctttgcttgtccctctgttttaattacctcctctttatcccatgggtaagggaggattcctgtcctggggttatgggtatgacggaacacctgacacctgacgtaaagcaactgagaccaacagcagtttattagtggcatttccacacaggctttgagagaaaggcatctcaagtctcgcaggggacatgggggttgtccttgggaacagagtgagcaatcagacactgcgggaggcaggatttgttgtatcaagagagtggtcttccccctggttcccaccggaggatgtgattggcttgttcgaataattctgtgggtgtagggtaggagggaacggaagcccaatactcaaggagaagtggaatatgcctgatccccgagggaagcagcgtctttttattggaggacatatccgcaggaacaaagttgggaggggagcttgcagtgaggtcactggagaccctccaggcttttcccagatgtcaaagcacacataaactgggccttacttttcggccttataccacaagctcttaatgttttgttttctacaattattaataatctttggctctacataagatgtttgctttgtgtaaatttgatttaacaatccgaatttaatatcaccgtataggttgcattaattactaactttagccaaatcaacaacatgaacaacatgtaaaatcccatataaaattttttcttccctgttatcagaacagaaaagaaaaacttccctgtttttcttccctgttataaaaattatttcttccttcttaaccaaccatttatcatgtctatttagctgtatgtgctcttttaaacttgctgtgttggctgtatttgtgtatcataaatataaactagaaaatggacaagtagcttcctaaactttgaagtgcaaatgttttattaagggaaaaaaaaaccctctttcccatggcattgcacttccatagaaaatataattatttcccccaaatccttttacagggttttgctatgttccaaaggacagggactgagctcactttgatttgagttggactctgaacatggttggattaacagcctcggtcattaatctctactccaaatttcagcatgctgtgtccatctattacaggtgtgggtgtgttttttgttgaaacaaaataatgtatacttactaatgctaaagttaacgaacaaaagcaaggttagtaatttttgcaacaaaacctacccagtgagggtcccagaaggctatctgagtaatacagtggggcaaatggtttcaattcaatctctggatgagctttgtttgtttgtttgttcatttgtttgtttgttttggagacattctcactctgtcaccgagtctgcagtgcagtggtatgatcatgactcactgtagcctcgacctcctgggcttaagcaatcctcctgccccagcctctgaagcaactgggactacaggtgcacaccaccatccctagcttattttttttatttatatttttgtagagatggggttattttttttttggtttgtttgtttgtttgttttccccacgttggttttagactcctgggcttaagcaatccttctaccttggcctcccaaagtgttgggattacaggtgtgagccactgcaccaggccaagatgatccttttcaacagcgtctaagttaaaatatgctacaaatttatttaagatcttgctgtaaaataaatcatttgaagtcgatatcatgaaacaacaggagaatgcaatgtgtttcctcctttgtcaaccaacagtgtggacccagcctggacttgcccacaaacagctgagcctaaagcctgcttcatccatcacctgaccttccataatgactctatatcacctcatttcttctattttttttaaaaattatgctgctctttctctttaatctagtttttcttcttcttatatcttctttctaaaataaaagagcacataaatgttttaaaacaaattagattttcaactttcagtaaagataaagttttgtcagtagggattaaagtttgccatcctcgacattgttgatatttctggctctataattcttggctttggaggaaagggctgtctcgtacactggaatcttttgcaacatccctggcttctacccattcaatactagaagtgcatcatatttccctcagttgtgacaaccaaaattaacccaaaagtctcctagtggcaaaactgcccctgggtaagaactgctgatatagatggtgctaaagtgtcacctagaaatcagttcattgtgttcctaggaactacgaaaggaaaattgacacattgtaagaattgactcaacattcatttgatttatatagcagtgtctgttatttgcagaaagcacgtactgcatgctgagatttccatagacttcatattgataaggacaatatttatggtgttaaagtatgcctacatatatagatctcctatatatgtactgcagataaaaatactattatgtcacctcatcagcataaatattgcaaaagaaaatgacctcttgaattctcatatcgtttgtctgtgatttgtggagaattacacaacattacttctaaacattttcaatctaagtggttttatttttattaattaggcattactttttattttgccattaaggatatcatcttttcaaccaggatcaatttgaatctgtaatctcctttggttaattggacattttccttattgtgaatttaagtttgggatcaagaggagattgattagatctgccacatagtttggccggggattatttatatagctgtttctttgcatttcacttttgctaaaaaagtagacattcaaaacaatataaatttgtagtctgttagcaaagtgtattctctaatattctattatagatatagtatgttctatagagtatattacactatattctattctattatagaatacactttgctaacagaataaaatttatattgttttcacgcactctattcacatttaagaaacattaaccttcataaatagcataaaggctgattttctctaaaacagagcaaacaaatcaataaaataactttgccccacttcttagcttccacctcaaagggttcttttttgttcgtttgttttgtttttgtttttgctttttgagatggagtctcgctctgtcatccaggctggagtgcagtggcgtgatctcggctcactgcaacctctgcctcccgggttcaagtgattctcttgcctcagcctcccaagtagctgggactacagatgtgtgccaccacgcccagctaatttttgtatttttagtagagacggggtttcaccatgttggacaggctggttttgagctcctgacctcgtgatccacctgccttggcctcccaaagtgctgggattacaggcatgagccaccattcccgtccctcaaagggctcttttcctactaaggaagtaaacgatgcaggcctgattgtgtgtttttttgcacttttaataacaccttcattgaccatgtgacaccacacaataccactccttggtgatgtgcttagcaatcccaaacaaacctttccaattcacataaaatgccacacaccctattcctccctacctcttagggttgtcataagaatttgaatgatacatgtgaatgctcttctgattttgaggatgaagtcactgtgtcatcttaatcatgcttatttggagttgtgcctagaggggcataatacacagtgtgaaaatatgttctattgaaagttcaaacgattgctttagtggttgatgccattaaattggtttggaggatgttttattgcatttaaattggactgaccacctcaaagagctatttggataactctaggcaacctcagtctggcacagataatccagttacttagtaagagtcttgagcacaaaactggggagggggttatatgataattctgattttttttttttttttttgcaaataaaaagatactcttgactgtgatcttatttccaattgtacaatgggttcaccttacaaaattaagtatagtactatccccatgcttgctttttaattgaggaaatagtgggtggtttggttaactaaacaaccatttgttagattaattctcactagcttgattcagaactatacctagtaggaaatattggagctaggaactgagcaataagcagcatttatttagggtgtctggctcatatatattgtgtccttacaacaaagatgcaaaacaggtaattattcccccattttgcaaatgacaaaaccgaagttgaagaagtgaattaacttactctcataacaagcaatgtcactttaatttttggcctttctaccaaagcatgttacctcttaaagacagcataaaatcagagcataacagattcatagaaagaatggttataataataattactatcattactactataattatagtttgtatccagaattgattaatcattgattataggtcagatattgtgctaagttccttatttaaaacctcacgatactgctacaactatcttcattaggaactatcttcattttaacaatatgaaaatgaaggacaaaataattttttgtttattcattcaatcactaagtgtaaaaataagagcgattatgtatttgcttgtttagtggtgccatattctcaaaggtcccaaagtaacaatttaaaaaaaaaaatgtatctgtccttgaggggaacacagtacatctatagtacaatttttcctaagagtagttatttgaaagtcatgacaaaaagggaagtggtcaaataaactgtgttgaacagccattgcaaattatttaaagcaattttaatggcaacaacaacaaaaatatgtattaggtgaagaaaagcagaatataaaattgttaatacagatcaatatctctttcacttagcagtttgatttcaaaatgtgcaggctgggcacgatggctcacgcatgtaatcccaacactttgggaggcaaacacaggtggagcacaaggtcaggagatcgagaccatcctggcaaacacggtgaaaccctgtctctactaaaagtacaaaaaaaatatctggggccgggcgcggtggctcacgcctgtaatctcagcactctgggaggccgaggcgggcggatcacgaggtcaggagatagagaccatctggctaacacggtgaaaccccgtctctactaaaaaatacaaaaaaattagccaggcgtggtggcgggcgcctgtagtcccagctactctggaggctgaggcaggagaatggcgtgaacctgggaggcggagcttgcagtgagccgagaccgcgccactgcactccagcctgggggacagagcgagactctgtctcaaaaaaaaaatagaaaaagaaaaagaaaaaaactgcgcaaaaattacatcaaaatactaatcatatttctgagatgtagtattatggataaccttttttatgtttttctgcattaatattcaataactttattactaatattcaaatattactataatcgctgaaagacaaatgctgtatgattcaacttatataaggcatctaaaatagtcacattgatagaatcaaagagttgagcggtgggtgccaggggccggggaggaagaggaaatgtagaattactattaatgggcatgaagttgagcaagatgaataaattctaggaatgtgctacacaccattgtacttacagtcagaaataatgcattgaacacttacaaatttgttaagagagtagatctcatgtgtttttaccattgtaaaataaaattaaaaaaatgattagtcaaaattgtgaaaaatacaaaacatatataatttgctttaaatatcattttaaaatatgtacaagatttgtatctcaatgtataaattcagatgcacataaaagttctcatccctttatttatcagttttaattttaagcttccatcttgctgttctttcgaaaggcttactctaagtcaatcctggtttcattttatttcagggtcttatcgtgtcattgtgtgcacacacttgtatgtacatacagtgatgcatgtgtgtatacactcatgtgttcccagagactagttgtgatacttacagtggcccctgtttgtatttcctcctccacgattcagtgattctctgctgcttttcctgcagtcttgggaacttgaatcaattgggaatgtgttgatggtccacctataaataattatcccaaaatagcaaccaattactttatttgaaaacaaaacaaaacaaaacaaaaaaacactagctgaataaactagtatacttagtattcggatactaataacataattcaaaaacagttctttggccgggcacggtggctcacgcctgtaatcccagcactttgggaggtgggcggatcacgaggtcaggagattgagaccatcctggctcacacggtgaaaccccatctctactaaaaatacaaaaatttagccaggcgtggtggcgggcgcctgtagtcccagctactcaggaggctgaggcaggagaatggagtgaacccgggaggcagagcttgcagtgagccgagatcgcaccactgcactccagcctgggcgacagagcgagactccgtctcaaaaaaaaaaaaaaaaaaaaaaaaaaaaaaaaaaaaaaaaaaaccagttctttatgatatatataaaattaaaaccatagacagtacctacaatctatattttcaatatcacattaaaaaagcagtgtaatatcagtatattattgtgatttatatgtcacaatttatccctgcttaaatatcatatagaatgcttaaaattgtattaattcaaagaattattcacaatgtcattcccaatgtcactttttagtttagagcagagtatgcatgcacagggattatttgtggtaaccatattatgaagtgtagcattatcttttattataaatgatatgatataatcaaaagagatggccttttgggtttaaagacaaaataaatgccacgtttactaaatgggtatatttgagatgattgcttaagctttccaaatcccatttttgccactcataataggaataagaatgcttacttcatagatttgtcatgaagattaaattagataataaatgccaagtgcttagcaccatggctggctgaaggtaaggatttatacatattagcccttattattattgctgctgttgttcttagttcttccctttggtagtgcatagagtcatgtagtaactgtttgtacttcctatattctcaactctgaaatgaattttattatctagcgtctgttcttaacctcacaagaaaacatgccttaaacattaaataagcataaaaatgaggtcttgatgctcacacagagaaataagcattttccagaaggagttgccttcaaatcaaaatataattgatactactcagaaaagagattttctctctgcactgattgacttgaaagcagaatagaagactggagtcacggagccagaaaatgtttagaggtggctggcttcacatgtattttctagtccaactattaagtttgcagatgaagaactgagaactccctgaaagaggaaacggctcctcctgagacttccccataaggaactagtagcagaaccgtattggatttggttttagtgcttagccccatgctcttccactatattacatttaaggtaacatgtacgttttcatttctattagaagtcatcaatgggtggactttgagtgtgagcattttgccttgcatgtaatagatattcttaaaatagttgtgaaagaatgaatccctcttttatctatcctatatatgaaatgactttgttggtaaaaaaaaatggccaattgctcagcaatttacactagaggataattttacaaccgcaggtatgggacacacttgggttcctttccacacttggacattttatagatgcatttttaagggaggaggagataacagcaatctcagtttttttctggaaaataaaaataattgttgtatgcccagtggaactatgaaggagcatattgggcccaagaaagtaaagaatgtctacacttaagctatttttaaataataaattaattcataggagaaacaggaatgagaggcaaaaatgtctagtaattaatataaagtccagcaaaatgacttaaaaacagttatatttgcaaagaagactcagcacacttatgtcataaaaatccttgtctagtcacagttttaatttatatataaaattaaaaccatagacagtacctaaaatctatattttcaatatcacattaaaaaagcagtgtaatataaaaaatataaaagcagtataaaaaatcttatctagtcacagtttcaatttctcacaattgtatgatcattttgacattataggagagtaaggatatgtaagttagctaagaattacagcagctttcgagaaagataagacagagaagtgagagatggaaagaaatagggacaactcatcgaaatcaatataaaatatgttagttaatagcactgtttgcaatctttaacaaatgtcctctagtggtttttaagtatagcacttcataagccttttgaaatggcatgttaaagtagtattaaaaggctgacttaccattagcatgctatttaatgtgtcattttaatttttaattttggagagttcctagaaatagtgtattgagtgagcattaacaaaagattattaaaactccaatgtcaacttaattgatatatcagaattcttatgacaaatagttcataaatttgtttcacacattatgaaatggaaaaaagtaacaggcacatgctctgtatattgctgttaagtgcatatcctaccataaaaacctctccattgtataacaagaggcttgtgagatacttgatgaaagggtagcatctcacctgctaaatgatgtggaagaattctttgactgaccacaccatctatagagatttgacattttccctgtgcctcacatagcattcttcacaaaaggtgagtgttgtttgtattaccttgaatgcacacacaccgcctttctttcctcccatttctttcccatctccagtcacagttcttatagtgtatttttctgtaagtagttgcaaaatattcaattaatagcagaggggacttattcaatgtcaatatatccttaaataaagaataataaagaagaaattactgtagggaatggaaaatcattctctccatctccaacaaaactatataaaacaaatccattttctaaaaatgttaaaatcttcccagttggctgaccttgtttcagtccagaaagacacagatttttagaactaagactgtgaagcccacatcaattttgcagtttcaagagctcaaattccttatgaaataagctgatgaaagtgtttaacctgtccaaatgaaaaataaaatgctgagtatttaaatgcctctgaaattaagtaaatctgttctatacatgtttttcttctaatttctgcttctgatagaaaatagtttagatgagattgttttaaatgcacaaatggacaagaaatctactgtaatataaagccctgtccaaattccagctcttcccttattagctatgaagccttaagcaagtcattgacctttttggagctcagtttcctatatgtaaggtgaatgtgataatagccgttatttaatattgttaattattaattgaaaagtttaatggaaaatgtcttgcacatagtaattattaagcaaatggcaaccatttgaatcttcactagaggctattttgtattctaagtcaagaaatatattggataagaatgaaattaagttgactacagatgaacttttgatgtaagtatgagcctatttgttctaactaactattcagaaattggggcagtgtaattcttaagtacaatttaagatgatcttttccaactctcatatttaaacaccaggtaaacaacattaggagtggctgtagtttgttggttgccaactagctggttagtggcagacacagatttgaacctacatgtctgttgtgtggataaagttttcctcttatatcctgtcacttatatgttcagtttcccttgtatcttaaaattttatgaggaattaattatgcttttttagtatattcttcaagtccattatcaatttcttaaagacacaaactggttattatactgaattcctactcttctcagcatctcaaaatgtaagttgcacaaagctaataggcatttttaagttgattgttagaagtagaaattattataagtaaaaatcattagaaatatatttctgattttacttacattttagtcaatattaaaattaggagttttaattaggaaaattaagaaaataaagacggtgattttctcatgaagttgactcatatcttttgtacctgtctcctttccaaactctgaagtataaaaaaggtggaaaaggtggttttataaaacaaaacaaaacaaaacaaaaaacaaagaaacaaaaaaccttacaagttaattcagaggtctaaaagcaaaagcttgatatctgcaacaggagcttgatgtacagaaactagaaggcaacaaaggtcacactgacctattatttaattagaaagaacaaaagttttctcaatgaccctaacagttctttaaactgaattgaagatgctggtagactgtaactttcagcagatcgtcgtcagttctaaggttatttcgtcagttctgttaccattacagccaagacatcatacgacagactacttcaaatctcacctctacttgccaaatccgggatgagaacaggacaggtgacacagcagacggtggcttctccacgctcatggttggctgaagttgccttctagatgggctttcctttttataaaactaaacagcatatcacactggaaattgtttttgccttgtagatatatctggtaacaaattctgacatattggattttataaattctatttaagccttacaggagattttaagtttcctaaaattcttgctgtgttcattcccaattatagactagtaagtgttcacacagactctaacgagtttttcttactgagaaagggtgcacaaactcataatgggggagaatagtcaagataaaaaatgttggcatcagtaattaaacaggtttgctttccctaatgccaaccatggtgggtatttatttcctctttattttgaagaccacatgttagactgtcttttagtcaggtaagattgctgtaacaaattaccatagattgggtgattgtaaacaatataaatttatttcttatagttttggggactggaaatctaagatcagggtgctagcatcatcgagtttgggtgaaggccctgtacaaggttgcagactgctagttccttgttgtatcaccatatagcgaagagaacgagctagctgtctggtcacttcttaaggtgggactaggctgggcgcattggctgacgcctgtaatcccagcactttgggaggctgaggtgggtggatcacgaggtcaagagaccgaggccatcctggccaacatggtgaaaccccatctctactaaaaatacaaaaattagccgggcatggtggcacacacctgtaatctcagctactcaggaggctgaagcaggagaatcactggaactcatgaggcggaagttgcagtgagccaaggtcacgccaatgcactccagcctggtgacagagtgagactccgtctcaaaaaaaaaaaaaaaaaaaaaaaaggactaatcccattcataaggcctccaccctcatgacctaattaactcacaaaggccccacctccaaatgctgttttattgggggtcagatttcaacatgaattttgggaggggacaccaacatttgggcaatgagggattagatctactaaactcaaaaaactgtgtattgctattccaaagaatggtattttttcataattcttttttatgagtatgctataatatttacaatgtagcagtgactaatcaaaaacccacctgtccgacattaattcaggcatccataagaagagataatctgaactgtccctagaatacaaatcttgaatctgacaggtactatttcactttgggcaaactacttaatttttgagcttcaacttctttatccttaaagatgaaacaaagaaattcttcattgatagaaagaaaataatttcaacaagcattctgttgagtatcttatgaagtctcctcagctcagtgccacacttacctaatcctctcgattcgcattcggttgttctcttcccattccattttgtgttagtttcttatatggcacaatttccacaaacttatgccttagaacagacatttattattttactgtttttgtggaccaggtgtctgggcatggcctagcccatcggcgtgtcagcctaggctgtggtctgggctgagattcaggcttcttgtgcaagctcgaatactgttggcagaagtctttttatcgcagctatagaactcaggatggtttacttcttcagggatggcaggagagacagcctttgttgctacaaatctcaaatctctgtatcctcttttaaaggggtcatctgcctaactcaggcccactaaggatggtcactcttctgacctaaaatcaactaattggagacctgtgagcatcagttgtatgtgtccatttggcaaggctaccttcttgggttggccaatcaaacattaacttaggtgttgtatggaagtattttatagacaagattaaactccataataaattgactttatttatttatttgtttgtttgttttttccaagacatagtcttgctctgtcgcccaggctgaagtgcagtgactcaatctcagctcactgcaacctccgcctcccaggttcaagctgattctcctgcctccacctcccaagcagctgggattacaggcatatgccaccacgccaagctaacttttgtatttttagtagagatggggtttcaccatgttgaccaggctggtctcgagctcctggactcgtgatccgccaacctcagcctcccaaagtgctggaactacaggcatgagccactgcgcttggccacaaactccataataaatttactttaagtaaaggaggctatctccaatagtctagctggtcctgggcttcttcccaagagtttccagtctgcctttcctgacagcctgtcctatggacttcagaactgccaaatcatcccctacattgcataagccaatttcgtgaaatacatcttaatatttgtgtatcctcccgtgtgttagtcctttctgcattgctgtaaaggaatacctgcagctaggtcatttataaaacaaaagagtttatttggctcatggttctgcaggctgtacaggaagtgctggcgtcttctggtgagacctcagaaacttttactcgtggcagaaggcaagggaaatctgttttcacatggcgagagagggagtgaaagagagaggaagtgccaggccatttttaacaatcagatctcatggggaaaatatagagcaagaattcactcatcacccggggaagggcacagagccatttatgagggatccacccccatgacccaaacacctctcactaggccccacctccaacattaggaattacatttcaatgttagaatggcagggtagggggagagcataaatatgcaaactctatcatcctggttctgtttcttcagtgaatccctggctgatataggaccttaattacatatactaaatccacttactatgctgtataacataaccataatcagaaaagaaaacccatcatattcacagattctgttcaccctcagaagaaggggattatacaggtcacctgtcccagaggcaaggacatataggggccatctcagaattctgtcttccacatattctccaactatttactttttattttctaataaattctattcacggagaacaaacagtatgactttctgggatgggacagtaagaaagcagttggtaggggagggaagaggtcacataaataatggaattaaagctttacgtaacatagagattgagtaaagatataaaagctggccctttctgacaatcggagatccagttccccaaactcattagctgctaatctcaaagttgcttacttactatcattctctgttttctagtaggtagagttgtccaatagaattttctgtgatagaggaaatattccacttctgctttgttcaatacagtagccactagccatatgtagctatggagcattcaaaatgtggctatagtggctgagaaacagaatttttgttattaactaatttaaatttaagttcaattaatcatattgggatagtggctgcagtattagacaacacagcatagaggaataatctatcggtcacagctggatttctacaggaaacttgacagctttggctataaataagacctgtgatatgtctgcagtttcaacatttgttttattaatgtgtacctgacaaacaaatgacctgaaaatctcttttcaaccagaaacaaaatagactggctcagtactatgctttttacatattgcaattttatgtgctttgttttcactttaaagaaaatatattgtgcctatctacaatctcagagggaaattaggtatatagcatagtctcttttcacgtggaatcttttgagggggactagattcatccgaaacactcaaataaaaatataaatagacataaatgcagaggcagaaaaagcacattgcctgtcggggaaaaatgagctatcaattcttctgtagccaaaaccacatatggttagctcattttcaaggttcaaatgctctgagaagtgtcatcgtattaaccacacctaagaacggatattcggggaattctgagatcctaactgacagtctgatcagaagttgggtcctagagagctcagaaggactgttagaatgctgatctgatccagagattacccaatgctaggattttagtctttgatttctatatagcctacctgtggttccagggaatttgaagagctttgcatttgtcattaaactgaaagagtcatatagccttgccagggaaagaagacagggatgcaactgctgattaaggccccatgtttttatgtccttcttagagtacggattccatgtcaggcaactttaactagctttcacaaatttctcttgaatatactcatattgttggctggaaggtttaaggaattatttgagaaggcttctcatttacgatggaaatgtatcagaacatgatttaaaactaaatagcagagacctctgttttcaaaagaagcataattaaaggaaatttaccactggcagtgtgtgtgtgtgtgtgtgtatttgcttcactccaggcccaggacctgggtatatggtttggcctctctttttctcccaggacctcattatgtatccctctgtgtcttcaactctgtgggactcttgcttgacttcttccagctgtttcaccatagacacattccttttattttgctgtgtaaagcaattcaacccagccttctgactggtgctctagggcctataatttcatcggcaaatggcccatcaaagtgtttagttaaattttctccataacagaaattttcaagcaatgttttaaaatagtgactttttcttctttttaacaaataatgaagtgatacttttaaagttattcagctaacaggtataaagcagattatcctgcaaaaaaaaaaaaaagatgtatacattcctccaaccatactctgtgggaacagcagcaggactgccccgtgcatctttcagcaagcaggagatgcatccctctcttgtaccatttatattaggctttaattatctctctacataactgcagtccccaaatatgaaatgagttcctgatggcagaaaaagcttcatatcaatttttgtaaccccaggccctagtatgctctctggcacctaattatagcaatcagtgaatacttgatagggtcatcattcacttaacagatattccctggccacatatgagaaagtgacatttaagctgagatctgtaaaatgagtaagagtgagacatgtggaaaagaagatacgggtagttaaggctgagggagtggcacagaatgaatcaactagcaagttaatgaatgaccaaaaatgctggtctatgtagtactagacagaggatcacaaatatcttgtttcaagtcattcttgagagttctggccatctgtatcaaaaacttttgtttggtcataataacaatcattgattcagtaacaatgactaagaaccaaccatgtactaggggctggatatgcccagggtatcatgatgaaaataaaaaccagtctctgcctttgtggggagactgacattacagatctgcacagtggaggtcatattgcacctgtactcatcctggaggatggtagtgctctcaaggtaatagaagccaacggaaatgtgacttcagtagtgatctgagggagaacttctccagggaggtgatggctggttgagctttggaaagtaggtgaaggtaggaggaagggtcatatttcaggtaaacaaaagagcataaacagaactcttggggcagaaagacaaggctggtgtggctgcagcaccgagattgaagggtgatttggtatgaaataaggctggagagttgacaaatcctgcaatagatggctttttaggcaatgttcctgatttctggttttgattccattagaaacccaaagagatgccaccaaactatcttaagccaacagtttgtatgtgttggagtgatggacatggaggaagcatatcatgatcatgtctgctctgggtaagccttgctctggctgtggtgtagaggacaggtctgaaggcagaaagagaagacttggtaacacctgtcacaggatatgactgcagtgccagggtgagacctggcagcctagactaggatggtggtagcagagtggaaatatctgggaggattgaagagctattagaaggtaaaatctacagaacttggttgtgggttacatgtgggctgtggtggaaaaaagtgctggaaatgcctcccatgtgtcagtctggttttacctggtattgggcaataccatgcaggtatggactgatgggagagactcagatttaaagaaaggatcacacatctgttgttttttttatttttgaggaggtgaacttaacactctgggtctttatttccttttcttcctttattcttttttttttttttttttttttgagatggagtcttgctctgttgcccaggctggagtgcagtggtgtgatctcggctcactgcaagctccacctcctgggttcacaccattctcctgcctcagcctcccaagtagctgggactacaggcacccgccaccacgcccggctaattttttgcatttttagtagagatggggtttcaccgtgttagccaggatggtctcgatctcctgacctcatgatccacccgcctcggcctcccaaagccttttcttttttttttttttttaacttttattttaagttcaggactacatatgcaggtttgttttatggataagaaaatgtggtacatatattccacaaaatactatgtagccataaaaagaatgagatcatgtcctttgcagggacacggatgaaactggagagcatcatccttagtaaactaatgcaggaatgtaaaaaaaaaaaaaaaaccacaaatactgtatgttctcgcttgtaagtggcagctaaataatgagcacacatggtaaatgttgaatccgaagtgcctttacggcatctacaaggtgttgcgtggataactaaataaaggagtcaagatctcagcttggataggacaaacgacaaattgtgacttagctatgcataggagaggtaattgaaaccgtgtttggatgagatcacctaagggtgagaatagagggtgagaaaagaagagcatctaagactggtccttagatctaaaaataatggctgaataatggaacataagcttcaaagcagacagagaatgagtggcaggtaggtcaggggaaatctagaagggagatgtgacaagaaagcatgccaggaagacagaaatgggcaccagggatgagcactgctaagagatcatgcaagatgaggactaaaatattgtccaggaaattagtaaaattgaagttgttggtgaccatagcatgagttgtttatggaagggacggaaatttaaacctgggtgatgtgaatggagtatggggatgaagggtggggttaggagattgagtcagaaaatgcagtgtggcatttccaaatgaaacacagcatcagataataggataaagatgaggcatttcatttgttcgctcttttaaacagcctgcttttggaatcaagatggtgaattcaattaacctattattatttcttggtatatgacagttcactagctattgcactccgtagaatttatttcattctattcaccctggctgaagaaccataggtaagatccaacattttcagtggcagcccctcaaaaccaacgtgtttccctgataatcattctgcttcccttcttttgttgtttctggagatctccatctgctcttccatttatcatctgcttgatattcttggatggtgtgcttggttggcctatgctatgggttcagataggcaagtaactatattccccttccccattacagatgatgtgcctcatttagctatgataaatatttgctcatttcctcacatctgcatatggcactgctaccaatccatcttttcctccccatcctcatctctgctaagttcttttcctgccaccatttctatggttgaccagttagcatttaagaaaatatgctgacagtagccgcatcatggattagcatttcttcatgttcataatgcaaaagccccattagatgtaaaaaacttgctttcttatctttcctttgttacacttatatggaaccttttagaagttctatttataagtagaatgatatgaataaatagaaatgtgccagtgaaatagaataggccaaaatatacatcatattaaaaatgaaaatcaatcatttaaataatattatggctctttgaaataatattataccctatatcaggaggtttgtgttttgtcttatttcattttcagtatgtttctattgaaagtgagattgccatcaagaattctcaaaaccttctggggtgagatttcagagcttcaactatgttaatagctgtgcttggcatatctaatggtgttttgctccttctgaagcattttttttaattagacaatacatttataaccaagctcagtgagggtccagattgtggatgaggattaaattgagattaagatataagtgtctggtccattttaggaagttgtcaaacaccgttaagagtacacagtaatgttattctctgattgttgaatataggcaagtttcaaaaggacccttcacagttatgaaacttttaagtttgctatagtgaaaagattgatacatgggaataaaaattcactcatgaatctcattttataaataaatgcttcatttatgtaaattgtttgtactttgtgtgggtaaacaatattgattgcacatctagttgaaattactggatgagaagtattagtatcctattcttatgtgtcgatttaacctacagcctgggttctcttgactgccacattcctttaatttcctttacttttatatactcatttatctagaacttaagaaatccccatggcttgtggtaacatgaactgaagatggtattacaacacatttccttctagctctacccagcacgaaagctttattataaggattctggttcttcttgctatttggggagtaatattttgaaaattcataagattatgtccatcaagcattccagactaacaataataatagtatatgaatgtatgaaataccataacatttttaatatgatatttttaaatgaataaatttcttcttttttcttttttttaaattatactttaagttctagggtacatgtgtacaacgtgcaggtttgttacatatgtatacatgtgccatgttggtgtgctacacccattaactggtcatttacattaggtatatctcctaatgctatccctcccccttccccctaccccacgataggccccagtgtgtgatgttccccaccctgtgtccaaatattctcattgttcaattcccatctatgagtgagaacatgtggtgtttggttttctgtacctgcgatagtttgctcagaatgatggtttccagcttcatccatttccctacaaagaacctgaactcatccttttttatggctgcgtagtattccatggtgtatatatgccacattttcttaatccagtctatcattgatggacatttgggttggttccaagtctttgctattgtgaatagtgctgcagtaaacatacgtgtgcaagtgtctttatagcagcatgatttataatcctttgggtatatacccagtaatgggacagctgggtcaaatagtatttctagttctagatccttgaggaatcgccacactgtcttccacaaaggttgaactagtttacagtcccaccaacagtgtaaaagtgttcctatttctccacatcctctccagcaccggttgtttcctgacttgttaatgaacaccattctaactggtgtgagatggtatctcattgtggttttgatttgcatttccccgatggccagtgatgatgagcattttttcatgtgtctgttggctgcataaatgtcttcttttgagaagtgtctgttcatatcctttgcccactttttgatggggttgtttgattttttcttgcaaatttgtttaagttctttgtagattctggatattagccctttgtcagatgggtagtatttttaagtgaataaatttctaagtgaaatcagttatgactttcaaagcaatttttaatctgctgcatttttattagtgatgaaaagtatatgagttttaatcatgaacacaatttaaaaagtcaaccaaagacttcaggatgttgttccttgttacttctgtcagtgtaaatttcattaatactatgggtgatgaataatatgcaatgtttaagctgtttatattttctactttaatagacgttctggctttactatcaaaaagaatgcaagatttataatttagaaaacaagaagaaaaagagcattgtgaaggtcaaactagctatttgcattttaaaatagctacttctcttttaatggacgttgctacaaatgtatagcaataacccctcagctggcaaataaggaacattgtattagtttcctgagtttctttaaaacacaactgcttcgtttcctcccacagatactatggtattagatgttttaattgaattacttagaaaatatatcgtttagcttcttaatataaaactaattttaatctgagaaaatttaaaaaagtattttctcatccttaaattcttttttccattgttttccaatttagccctattgtgtctacaactcagattttaatcttttttttactaaaacaaatttattatttaaaaaaattaacttttctttttttccttataaaagtaacctacatttgtatctttagttctaaaattacaggtggccctaattcttttctctttggtatctggagaaagtgaatgcaattatgattagcagaaatgcttttttttcaattgcacactttatttagtggaaacaaaagatgcatgtatgattcaacttcacaaaaggaaaagactcaaagcaacactggtgatgagccgtttcatattcttaggtagacgcaagatccccgtacttcctgaaaccttatctaatagtaaaatattttctgactgtttctccagtcttttaccactcttgtcaatggatacacaccaaatacataaataatgtatgcaggttcattttgggtaccatctagctacacagcccagtggagtggttgagtacaaaagccagcctagcttgaaatttcaagctttgacattttctagcttccttgggcaagttacttagcctttctgtgcctcagttttcttacctataaaatgagaataatgatagtaccctcataatagggtgattatgaggattgcatcaggtaactttgtaaaggttctggaacatatagcaagtactatataaatgtaatacgtatgcaattaaaataggcttcaagatacacagattacagataaagaaatagctgtagacagaacatatcactttattcactccacattattactttttacattttcaggcttcttactaccaactaacagggtatattattagttctcttgtctatgacatctgatataccttccttcctttcaaagagtgccaaacattttaaatgatacttacatttttctccaatgtatgctgcacaattaagtagattgatagatatttttcatcagcacaaagagaggatcgcaatacatataagactttatctctgctgcaaaatataccttgaaagaattacatgtataatgaaaataaccctgacaatgccaactttatctgcgaaatcactggccgttgactttctgtgaaagagttaagtacgttgctgtatcaaatattcagttactcattaattaaagtagaacaaattcaatactttttttgttcagcagattaaccaaaaactaccatgtaccatgtttgcaatttatattcatcctataaactgcatatgcattaaacatttccatctggagccccgatgactgtttttctcccatctcatgcttgataagctgttactgattagacagggaattctgaagctgttgaaagcacagatttttttaaagctctatcaccttggtattctttatctcttaacagaccttgcttgatgcctgcaggttccattttggctgcaatccagataggaactataggtcccctggccacgatggtctaacacagacaacgttatttggtatctatctaattattcctccattaaaaaaaactctctatctagtctaatttctaatattgaatttttcttctttaattgtctcatttaatttttttttttttgagatagagtctcactgtgtcccccaggctggagtgcagtggtgagatctcagttcactgcaacttctgcctcccagattcaagcaattctcctacgtcagtctcccgagtagctgggattacaggtgtgcgccaccatgcccagctaattttttttattttcagtagagacagggtttcaccatgttggccaggttggtctcgaacttctgacctcaggtgatctgctcaccttggcctcccagagtgctgggattacaggtgtgagccactggcctggccgtcttatttaatttgatgtcaaaccttaatttagtctgtgacatactctgtaatataacataactagcatattttggtgcatggtgttttctaactattgttataaagattttacgcattttgactgatttaatcctcactaactgtgctacgaggtagatgttattattatccccatttagtaggaaaactgaggtcacagggaggttgagtaacacagctaggaggcagtagagctcagccaggaacccagagcttctaattctgggacctgtgctacctgccaccacaccacggcctgacagagctgtcttcatcccaccgttagtgggacatgcagtttgggatgttgctcccgtgaaaaacagtattcaaaagacccacagcctgactccttctttataatacacaccctggatagcattaggagatatacctaatgctaaatgacaagttaatggttgcggcacaccaacatggcatatgtatacatatgtaacaaaactgcatgttgtgcacatgtaccctaaaacttaaagtataataataataataatgataataataataataatgctaataataataaattaattataatacactccctgcctgactccttctttataatacacaccctgccactttgtgctacctgataggaatcatttaatagattaaaaatggagtatataatctgtgtgctattaataattaaaaacaatgacaacagcaaacacaataacaatcccatagctgctgtttgttgagaatccccacgtgtttgtcctttcacagtgtctgtaagccgcgagacttactgtcatgtgtcatcagcacctgatgagatattttaaatatcacttcatactgagactcagaaaagtgctctttcttgtaaaagggcacaaagttagtaagtagtagaaccagaattcaaagcctagtccttttttttttttttttttgcatagccatatgctctcttatatactaattggttagaaccctctagcttgaaagcaactcagctagccagcaaatatccccccaattaggaggtgactgatgtcataaccagattgctccctgttctctttttgtttgctataaacttgatcctttggatttgtgcatattctaaagatcaccctgtcaccatgcctggaggcaattaagtataagggagtagtgtttcaagataatctcccactgtgaaaacatgggaataattatccaacgtaaacatgtcatttcttttctaaattacatggattccttttttgcactttaaacctggattatacatcttactcaacttcgtatccagacccaggcatataccagccaggtgtatagcatgaacttaataaatgttgattaagtgaagagacttaataattaataattaactaatatatgatgaaagaattttaaaaattcacttgtttgtccatagtttcatgtagtcaacaaatgcaatcaaaaggccaatgatatccatgaagataacatttattttttaactaaaatcctatgttttctgtaattgtatggtagcatagaattttatatatataacatacattcatatataacatatataacatgtatatgacatatatataacatatatatctatatataaaataaatatatataaatatatatataaaactttgtgtcatttcaatcctgagctattttttatttttctgcctcatgtcaattagaatcagtctccccctttgattccagtcaattcaaccaccagtcgttttcctacctcttcctgacctcctcaccaatattgactctggctatgtatcctgaaaagtgagaaagattgaactgatatgaatgaaaattagaataaatgtaaaattcacacataatattgtttatttctcctcatatggtacacaaatatacacttaaattttatttcatatgacatcaacatagtgtatattcaacaaaatataactcctgatcctgtcttaaggagtatataatctaatgaaagattgaacacacaacagtgctaagaaccaacagctatgaagaaggtgcaatattcacaaagaaactgtctttgtgatttcaggtagtgctccttagtatcggattgttgagccacatttgaaagaatgattgtgaatttatgagaacatacaccaacgagtggacagtgggatgcctctatccagcaacacaggccactgtctcatagttcctcatcagctgctacaggattcactccaaatttcactataggacctgccagcttgtatttttgtctcttgagtctacgccaaaaccaaaactggcaatcccaaccactcatcacttaaaaactaagagattcttttttttttttttttctgagacagagtctcactctgtcgccaggctggagtgcagtggcgcaatctcagctcaccaccttctccgcctcccgggttcaagcgattctcctccctcagactcctgagtagctgggactacaggcgcaccaccacacccggctaatttgtgtgtgtgtgtgtgtgtgtgtgtgtgtgtgtgtgtgtgtgtgtatttttaatagagatggggtttcaccatattggccaggatgatattgatctcctgaccttgtgatctgcccacctcagcctctgaaagtgctgggattacaggcgtgagccaccgcacccggccgagattcattaatcttaaaggcttggtcaaagagcaagtattaaaacaggaatgtcactttcagtttcatcttgtgccgttggccattcataccttcctgctacatctgtacagtcttccacgcccagcttgtgcttctagaaggaaatcaaatgagacgatttgtatgctggtgctctgaaaaggagggagctagaggatcaataggctctagctaatagttttttggatccgaataataatgtttatagaactggaagactgcagtttagaatggtccttgatcacttattcattggtctgttcaagcaggaaatacaatggtttcattgagtgctaggaaaaaaaagaaaggtaaagggtgttgaattcagccactggctgggctttgaccagaagggaaaatcagggattggatgctgctatttaaacattagcatttacaaattaattggtaccacgaagaaaggaaaaagaaactgaaaactgtgattaccaaagaatagtttaggaccaacatgctccccttttctttacatttgcttaggccttttatcgctgcctctttgaactgaggctgagattcacttttttgtttataagggcttacttgttactgagaacagagccaaaatgggcttgcagcatctgctcataactcattaaccagaacttggtcgtgtgaccaccaacacttagatgcaaaggagaatagaaaactagtctgagttctgtagccacgtacccagctaaaagctgcaatttgtatcactaaagtaaagctcaccttgcgctttcattgaacagctagcagtctctgccgtgcgatttacttcctcgcccctagacaaatggaggagagaattcctcctcttctgtgctttgaaagatcacaattgtcataatttttaagaggaaatttaaaatatacatttaaggaaggtttaatctttagttcttactaaaaattctgatctgactcaaactgattcaaaaagcaaggaaattcagtttcctatatgatggaagtgtcagggtggaacagatctcaggaattagttgacccactgacctgatgctttgggagccatttgggagccattccggcatcactgcgtgtcctgagcctggctcccatcttggggtcaagatggccacaccctttcagttctcacagacacacactgcaatttccagaggcagggtgaggccatctgctctgccgccatgttcttctcaggaatcggcggccttcccaaaggtgttctcagcacgcctctcatcctctctcgctgtagctgagtcacatccccatgtttcatccaagtagcggcaaggaaatgggattgcctcggttgacttggatagttcaggactggctcccttgcagagaaaagagagtcgcttcccttgaattatatgaggactggatggacactggacacccaatgagtaaaatcaaggcttgtctgaggtcaacagtaacaccaccaaaagcaacaaagaggaaatggatgttaggtcggcaaacactgtctgctacagttcataacgtagtttcgagagccttcaaaagtattaatgacaaactaacgtttggaatatggggaacactgtattttgcttctagtgatttggagaagtaggcaataatgtcgctcacctctactaaatgtatattgtaatgtgtacattaaatttaaaattgtacaaatgatttctcatcctcaaaagactaactcgttttcaggttaaaagtaaacatcattttatatatatatatacatatatatatatgtatatatatatatacacatatatatgtatatatatatacacacacacgtctataatgctatatataaaaaatatatctgtatgtgtgtatatatctataatgctatatatacatatataatacatattatatatgatacatagatatataatgtattatatatttatatagcatgtgtatatacatatatgctatatataggattatatatgtgtatacacatatatgtatatattatatatacatatacacatgtatgtacatattatatacatatacacatgtatgtacatattatatacatatacacatgtatgtacatattatatacatatacacatgtatgtatatattatatgcatatatacatatacacatgtatgtatatattatatagcattatatatagcattatatatgtgtatacacatatatgtatatataatacatatatacataatgctatatatgtatatataatacatatatgcataatgctatatatgtatatataatacatatatgcataatgctatatatgtatatataatacatatatgcataatgctatatatgtatatataatacatatatgcataatgctatatatgtatatataatacatatatgcataatgctatatatgtatatataatacatatatgcataatgctatatatgtatatataatacatatatgcataatgctatatatgtatatataatacatatatgcataatgctatatatgtatatataatccatatatgcataatgctatatatgtatatataatatatgcataatgctatatatgtatatataatatatgcataatgctatatatgtatatataatacatatatgcataatgctatatatgtatatataatacatatatgcataatgctatatatgtatatacacatatatgcacatagcatgcttataaatgctctatattgtatatacatataatactatatataatatataataatataataatatatacatgtatatacatatgtacatatagcatatataatgctatataagcatgctatatgtatatatgtatatacatgtatacgttataccatatactatataatatatagcatatataagcatgctatatgtatacataatgcatatataatatataatgctgtatgataattatatataatgtatataatatgtgatatatgatatataatatgtaacatgatgatgtaatacatataattttatgtattttattatatataatttatatatatgctatgtataggcacacacatatagtgtttgtgtgtgtatatatatgtagcatgaggttgtgagctagtcaaactttagtcatatcatttaatatctcaagtttacattgatgaaatatttataatgaaatcctttgctacccactaactctgagaggtttgagtacttataaaatcaggcttatttttttctcaaagttgagaaaagcattttttctccaagttagaaaagcattttttgttgtttattaataaaccaatcaaagctgatgtcttttggtttgagaaaaacaaataattttcttaagaaaagtgtgatgaaaattatagcatctttaatgactttgttctccatctcctagtattgttatctttgtatgtatcccttttgcctgggctgggaaaactgtactgtaggtcaggggttcccagcctccaggccacggacctatactggtccatggcttgttaggaacccggccacagcatcagaaggtgcccagtgggcaagcgaatgttcccacctgagctctgcctcctgtcagatgagtgcccgcattagattctcataggagcactaaccctactgtgaactgcacatgcaagggatctaggatgaacactcatgagaatctagtgcctgatgatctgaagtggaacaacttcatcccaaaacccacccccaagcccaacctgtccgtggaaaaattgtctcccaaaacactggccctggtgccagaaaggttggagatcgctgccataggtgatatctctcctagaaccatacacctctggttttaagagctaaaaacatacagacttattctgtaagtgtaaacattttactgtgtgttacctggccaattcttcacagctgatcattgtatatttttaaattctcttcatgtctcatcgttttattagcgtgtttcttcccattatgccattctgaaatccttttacaagttgtcctctggtccagtgatctggtgatacaaatgattgatagcaataaacatatcatttgcatctgcaacccaaatgtcctgtgtgttcctgtagaaattatgtagctaagacacgcacacgaaagctctgtaagtcaaagagtagcgtcgtgtttttccaaataaatttttctttaaaccttggagcctcattgaagcacaacttgaaatggtagaaaaacccagtggggcatgtcaccaaaagcagtttcctaccgcagcttccaagagaacttcattagtgttttcaacctgaatactaatcaatggcataaactctaaggaaattttaatatgaatatttttaaaggagcattttaatgtgaacgtagtgaaaatacaaaatcatatttaaataggaaagaaagggatatctctgggctcaatgagttttgaaagaggagaggtttgaagaataaatgagtttacagaaaataaacaaaaatatgaaacaaagaagaaaatagatacagagaagcaaaagtataaaaatagcaacatttaaaatttttatctatgctctttttgatacatccacagaaaatatgtttctctttctttttcttttcataaaatttatttttatttttaatttttttaaattacttttttgagacagatttctctctatcacccagaatggagtgcaatggcatgatcatggctcatggcagcctcagtttcctggctcagtcagtaatcccacctcagcctcctaagtagctgaaaacaggcatgcaccaccatatgtagctaatattttttaaattatttctgtggagacagggtctctctatgttgcccaggctggctcaaactcctgggctccagcgattctccaccccagcctcccaaatcgctggaattataagcatgaccacctagtctggccatacagaagatacataatcttagacccccttcctcatgtaacatgtagcactttctctaactatatcaaataatgtctgggaaacagcaattttaaatctttagtatggtataattattgtcaaagcaaaacaagatgaaacttcagaaaagtctagtacagagcttcaacgaattcaagttaagttttacacctgttactccctgatacttagaaaagttttatgcttgcctctattgtgcttagagagaatgttgtggtttgtaggaaaatagacactggtaagtgtaactgtatctgaaatttgcacacttcaccagtgtgtctggttattatctacatggtggaccttcagtgactggaggacctctctttccattcaagctgtctttttattaaccgttctctggggcctcaagttccctctgcagcatttatttccctttgagttaagtattgttcccattattgtcttagaaacgttaagtatcattagatacagtatctcattgtggattatgttatcagattctttgcaatgtgtctcttaacaaaaggatattgagtggcagagtggggagtggaaaatcactgaaaaaagaggacaccgaagagacacatgaattttctttgttctgttttttttaaccagtggtcatccctagcaaagatgtgtgtaagtgcattaaaaacatttgtgtgtagcgaaagtggtgaatttctctatgcaacatatttaaaagtcattgtttgtacctcacttgcatggctatttggccctataaatattggctcttgtctaatgacattttctatttcactttttaatagaatttgctgtaaaatggatactacagaaacagcattttattttcattcttggcaaaatcatttccacccaaagtgggggagctcctaacaatggttgcttctactttatttataagaaaaataatcaaggccgggcatggtggctcatgcctgtaatcccagcactttgggaggccaaggtaggtggatcatatgaggtcagagtttgaaaccagcctggacaacatggtgaaaccccatctctactaaaaaatacaaaaattagctgggcatggtggcgcacacctgtagtcccagctacttgggaggctgaggcaggagatccccttgaacccgggaggtagaggttgcagtaggccgagattgtgccactgcactccagcctaggcaacacagccagactccacctcaaaaacaaaaaaacaaaaaaaacagccatcaagcagacatggtcatcttttgcctgtagtgcaacagaactgtttaaaacacagtttaggccttaacgtggaaattcttgcttgcagcttccactaatcaatctcgctaacctcaggactctaactttcattttcctaattcacatttcaaaacctttctaaatttcaagagggaatgatttatcaaatcatctaactctttcaaattttggagaaataaatctcacttggatcactaaaaataaagaaaaggatcactatggaataatgaccctttaatagaaaaagaaaatatttctaacataaatattggagcttttctgtggtagctgtcaaatccaggagtttggaaattggaaaactagaaattagaaaagaacaaaaaatagatgttttaaagttgcaaagctccttttctaaccttaaattttgaggttacaatcagtttaaattttaaggtttaaagccagtttctaaatcttaaaactatattatttacaagacaattcaagtgacaaaatacatagtagtcagtcataaactaaatcagattctaaaatattatgtcatattatgaagcagtatgtaactaaagggctggtgattgagccctgaagggccgtgtcaggtcttctacttgttttcaaaatcaaggctgaagctgggtgcagttcccacctgtaattccaacactttggaaggccaaggcaggaaaatggcttgagcctacgagttcaagatcagcctgcaacatagagagaccccatctctacacaaaaatacaaaaattagctggacatggtggtgcctccctgtaatcctagctactcaggaggctgaggcaggaagattgcttgagccccggagttcaaggctgcagtgggctgtgatcataccacttcaatccagcctgggtgacagagcaagatgctgtctccaaataaataaatgaaagaagaaagaaagagaaagagagaaagagagacagagagatagagagagaaagagagaaagagaaagagaaagagaaagaaaagcaagactgcttctcccagcaatttgttaggatcctggctgtccgcccaagatgggttagatgaatggctgacaaggaatttgttttctaccactgtcacatgggagctacattaccccagctgttgcccctgcagagagaattatctgtatgttccgtgtatgcatcccaccttttcaacatcttgtagcagttccacttgagaagtttcaagtgatcggagtcctggccctcccacttcattgtctccataatccctagcattgcacttctctgtttgtcaatgtctataaatggtctctttgcaaggcttctcatgctatgtataaaacctttataaatagcatccactgcgactcacacagagccacttggaaaaacattcttgtcttgtttttctcacatatgtctaaaattttacactttttcctttatttttacttgatttagctaatttattcttaaccacagcattgtggtttagtaattgagacattttcttcattttgaactccagagtctcatcaactttagtcatgaaatacaaaaattggaaataagtctttgttataaatctaggccttgggtaggagttaactaagtttggtagtttgaaagttatagaaaccaaagtttacattgaatacatacagccaaccaggtgttatgacactgaattcctatattcaataaatattagttgttttctgggtggcaaattcataagctataaagaaattctggcttatattatgctgatgtggacagaattacagatgatggacttgaaggtgttcatataagcacccgtcctcactctgcaccaaaggtgtctcagggcctagtgagggggcagtgccagaagcctccaaaatacttgtttctctgaaatgttcttcagtacagaaagcagtggaagcagagtagactgaattatgtattttttcagctttcactttatgtctctacagtttgctctcttcctcactggggagaaaataaaccagctacctcagggaagtcagcacaaatacagaacagtaagggagggtcccatagtcaccaagcaagacgcccaatttgtcctaaatccattcatgcatgttatggtaaaaatatggccctgttctccttccaggcatgagtcaatgttgctaagtgggtggattagaatagtcattatttcaaatcaattagacaaatacttaatatgttgccactccagctactgtgaaccagatcttgatttagtaaagaagactgatatagaacatataagcgtgtgtgtgtgtgtgtgtgtgtgtgtgtgttacaattctctggtatttacaacaagggctgtactgttgtgctaggctaaatattagcaaaaagagagggaaatatgacatgttttacctgaatgggattaaatcttttattttacacttgctcaaggtcatacatttattcttactggtcccaggtaactgcagccatgaatatttttcttaatttattcagatacttttttaatgttctagaattaaaataatttaatcttcagaaatgtgtatctcttttagcattatcaagcaactaagaatataagtaataattataaattgttgtgttagattttacttctaacaccttccaattgtttattaaaacaattgatataattattctttgtaaaaattaacaatattgacaattatatgtggtttttaggatgtaatatttttgctgcaattggctaattttgatacttttcttacataaattttaagtgattgtccagtcacccgtgaaagcgtttcaatgtctgtggattttatgttttaaaattgcatttgaaatagtccaattcataatgtgctaaaataatcaagaaatgttctctaaaatcctgaattcttccatttaggatctaacttaaaattcaaaattaaaaataaatgaaaaattaagcttgggcaagtcaatcagaataagagatgcttaatttctgtagttgaagggagaaaattaaagtgatgtcagctttctcatgacccaagaagtatgtagttgaatcaatagcatcatgaacgccccatcggatgatcatggagtctcttagattcctcgtccccttccttctttccttaaacagacccagaaagtgaatcggtttcctcatgggcaaataaaccaagcctagatcctgatctctgggctcagagccaatgctcttctgtatcctgatgggatggtcatgatgctattgactcaactacgtatttcttcggtcatgagaaagctggcatcactttaattttctgaaaaatgctctgcctcagcatgctctttgtcgtgccaacccttggaatgaaggcatgtgctatgattctaagtttatattaaagaaactcaaccatatacttttttcttttttctttttttgagacaagagtctcgctctatcaccaggctggagtgcagtggcacgatctcggctcactgcaacctccgcctacggggttcaaaagattctcttgcctcagcttccctagtagctgggactacaggtgcgcaccaccacacccagctaatttttttttttttttcttgctctgttgcccaggctggagtgcagtggtgcgatctcggctcactgcaagctccgcctcccaggttgaagccattctcctgcctcagcgtcccgggtagctgggactacaggtcccctccatcatgcccggctattttttttgtatttttagtagagacggaatttcaccatgttagccaggatgatctcgatctcctgacctcgtgatccacctgtctgggcctcccaaagtgctgggattacaggcgtgagccaccgcgccaggccattttttgtatttttaatagagacggggtttcaccatgtcagtcaggatggtgtcgatctcctgacctcgtgatctgcccacctccacctcccaaagtgctgggactagaggcgtgagccaccactcctggccaaccattgtcattttaaggacttaaccaccctactataaatagcacttgtaacagcactatatctgtcatgccttgggaaatgcataaattgttaagattgacctaagctgtaaaaatgcaggaagttgaaacacagatgtgtaggcactgtatcaaatgtatcctgtttccaagttcagttcctttcccaatgaccccctcaaaaatgtttttctaaaattaactggatttgtgatatatctgtccttatattttctgaattcaaaataatttccttcttgaagctacagaattctgcaactttgcaataggtttctaatatttccaatatctcaggcctttattcaaaagaaaatgccagatcttttcaagagaaaccctgaatttatgttagaaagagaaattcaagctataaattgtacaaaataatatctaaaattcttatagtataagaagtcaacttcaagcttatttatagctttaaagtaatttagggtttagagagaagagagattaatgttcctattctagtagactcaataaaatatttgtttttatgttgcaatttttaagcagaatattttctacaaagtcaggaaaagtaggcaatcatcaaatagctttaaaaaattctgagcttcaccatagagggaatgtaaattgaaaaatgtgatttggattctgtgattctttaggaatctcagattctacatacctctgtactacaaaaactaaacttattgttgatatagtggttagtgaattttaataattaggtatataaaccacagtgtttagttgcagcaagcatgtcaggaatgagtgattggcctttgtatgttctacttgtaagttgcatgtactaaatggcacgtccatgctgtggaaggaaaaggggtatggccgggcgcggtggctcacgcctgtaatcccagcactttgggaggccgaggcaggcggatcacgacgtcaggagatcgagaccatcctggctaacacggtgaaaccctgtctctactaaaaatacaaatacatatatatatatatatatattagccgggcgtggtggcggatgcctgtagtcccagctactcaggaggctgaggcaggagaatggcgtgaactcgggaggcggagcttgcagtgagctgagatcgcaccactgcactccagcctgggcgaaagagcgagactccatctcaaaaaaaaaaaaaaaaaaagaaaaagaaaaggtgtacgtatgtcagatgatacaatgcagcattatacttatttttgaagagatttgctgtttgttaatcatttgcctcaagattaaattaaatatttattatattctgctgacatatatgtggtagtttgaaatggttctctactttcttgtgtaaaggtaaataaatgcaacgtaaacacaagcagtcttcattattgatagtaattatgtgctataaagttgccaggaacactgatttagcgaatactgaattatttctcctaggggaagtataggtttaggtttcagtgagcctctggtcactacagtttttgagaggacacaaacactcataccgtagcgttctgccccaaaaccccaaaattcacacaattctcacacacaaaatgcgtttattccatctcaatagccccaacagtcttaattcatttcaacatcaattttaaattctaactccaaagtctcatctaaataacatctaaatcagatgtgggtgagactcaaggtgtgattcatccagggcaaactgctctcctgctgtgaacttgtgaaatcaaacaagttgtgtacttcgaaaatacaatgtgggacacacatagaatagacattatcactttaaaaggaaaaaaaataggaaagaagaaaaaggtaacaggtcccaatttaaagtcccaagccccgaatatcctgccacctagatggttctctgcagtagccccacctccatggtggctctgtgcctgggtcaccagctcacggctctttcatgctagaatcacacactggtggcttctaccggttttgatggcggcaaaacttggggcagccgcaaccccatggcacctctatacattgccctagaagggactctgtggagatcttgcagagcaacagatctcttcctgagttctgcaacttcccagggcatcctcatttctgtctgagacctcatcggaatggcctttatcacccaaatttctatcaacattctgttcacggccacttaggtataccttaagaagattgaggttctttctacagctctcctcttttcttcttaagtcctcaccagaattacccttaaaggtccattcagaataatgtagccttttattattattattccttttttttttttttttcttttggagaaggagtcttgctgtcacccaggctggagtgcggtgccgcgatctcggctcactgcaagctccgcctcctgggttcacgccattctcctgcctcagcctcccgcgtagctgggactacaggcgtccgccaccacgcctggctattttttttttttgtatttttagtagagacggggtttcactgtgttagccagtatgatctctatctcctgacctcgtgatccgcctgtctcggcctccgaaagtgctgggattattattattatttttttaaagcatgaactttgtaagccttccagcctctgcccatggccatgctccaaaaatgttcctacgtttttagtatttgctgcagcaggactctacttgagtagcaattttctgtcttagtctgtttggcctgctataacagaataatataaactagatagcttataaataacagaaatctaattttgcaagttctaatgtctgagaagtccaaaatctaggtaccaagagatttggtatctgatgagggtccactttctggttcttagatgatgccttcttgctgtgtgcaagggcaacgcatctttctggggcaactttattttttttgtttttgtttttagagacagagtcttgctctgtcacccaggctggagtgcaatggcgcagtctcggctcactgcaaccttcgtctaccgggttcaagcgattctcctgcctgagcctcccgagtagctgggactataggcatgcaccaccacgcctggctaatttttttttttttttttttttgtattttcagtacagatggggtttcaccatgttggtcaggctggtctcgaactctttacctgaaatgatcctcccacctcggcctcccaaagtgctgggatttcaggcgtgagccaccgcacccagcctctggggcagcttttatgagagaactaatttcattcatgaggacttcaccatcataacctaatcacatctaaaggccccaactcctaacactgtaacattaagaataaggttttaacataggaattttgggaggacacaaacattcagaacatagcagttaataaaatatttgtaaaatttatatatgtatatatatatattttctttttagtaagttctatttcaaatctcagtgaataagtttcagatgtatgttgtttcattgtctttcattgtttttcttgcttctttctttttttcttttgaatctgacatcactacaatattgatttttgtttctaccttcattttataatcatataccttaccaagctacagaaacgaggcagaaaaacaatttccattttatttcagtacatcttcctaaaactggatcctggtttgcttagttgttattaacaacacttgatgagctattattaattaaataattatcttttatctcaaatgtggaggttcttgttcctatgaagcccacccttccctttagcagcagcaacaacaaaacgacaggcagcttctcccttcatatgggtcctgacagatgagccttttggacccctcgtaaaagtagtaaatgcacctttttcttttatttacattaacatttgttttttcttaaccatgctctctctattgatttagcattaatcatgttgtttcctacagaatttaccttttgaaaaataaaaacacaggcagatacatactggttattcacaggaaaattagggtgtaattattagcagactaattgtttcagatttactatgatccatgaagtcttgtatttgacagcttaaagaactatgtggccaagaagacataaatgtgggccagtagctagcagcctctgcataatacaactccaaatcaactggtgaacatttaaattggagtaatttaattaaaaatttgaatttctgggcttccttgaaaatgtattgtttgaataacaccagcattcctgcatatcataagttacctccatgtgaatagggacagccccttttatccacaacatatcccaaacactgcatgaatcctctgccatcatggctgagcttttaatctcttcattagaatctctttttggttgattttctaatcagggaaatatgtctctcttggtcatattgctatcaaaagtaagaaagtaaaagatcaatagaacgacatgatatttataaccagccagcatcacacatttgtataaactgcttgtcttctctgagcattgaagttgtgacttctaattttagaagctacaaatcattttatctctgtcaggactggttctcgccacaagttgtgtaagtactgctcatttatgaaaataaattaattcaacctcttcttcatggccccagtgagtgtgcaggtgtcatgaagtaatggacagcacccaagttcacagtgaatcagattccctccaatgcccaaatcactgaggtgtgttcacgagcagaccacagagtactgtttttagtgttttaccagacaggacctaactgctctagcaaagaggaaagagaacattatctcacaacatgtgtaccttttgagctttactaagcctattttatggttgaggtaaaattttcacccaaaggtatgtgaaatcaaaccaaaattacagaattgttgtaatatattgcaccatatgcataacctcaaaagatactgcacacatatgtcccaatctctcacaaataagagaaaatcatttgtaccaactaatttagctttcaggaaagcacagaaagtaaaataaataaaaatgacattttttcctaatcacctattacatattgctactcgtcctgacaaatttgtaggggttgttgatggatgtatagcgttcagaacattaatgattttacaagtttaaagtaatggtgtttgttcatgtacatatgtgtggatgaatagttgtatggatggatggatgatgtattagttggttttcatgctgctgataaagatgtacccaacactgggcactttacaaaagaaagaggtttaatggacttacaattcctcatggctagggaggcctcaccatcatggcggaaggtggaggggaccttgaacatggcggcagcaagagaaagaatgagagccaagagaaacgggtttccctttatcaaaccatcagacgttgtgagacttattcactcccactagaacagtatgagggaaacggtccctatgattcagttatctcccaccagatccctcccacaacacgtgggaattatgggagtacaattcaagatgagatttgggtggagaaacagagacaaagcatatcagatgaatttgaaaaggatagcgcatagaaattttggatagctaaagaagtaacaaactaagattctgtgtaaaaattaagatggtgggaaaatgaattcgaatatgtagcgtgtttcaaagaggaatttttgacattttgtttttgttttcagggtactgtcaatttcattttaaattctgaggctttgtaatattggatttatcatacacctggagtcagccacaactgtaaattttgatctgaaattcttcagttagtataaaatccctaactgctttgaaattctgtgtagtgataatgcatcatctgaatgctttgcatcctttaatgacataggtatcttctgaattctggctttgcgtaactgttgccaacactgtaagaacatcagctcgtttgaggctgggtctttgttctctctgtttctgggccctttccacgccctttctcctctccctcactagcacaggagttatctttccaatgcaaacctggacatgcattttccacttagaataccatcattacacacatgggccctcagcttcctcagggagcattaagtctttaatcttccaattctcaccctgcacatgaattgtaagccttatgtagtaaagtcacaaacaactgagcgtttttagaacagtcgaatgtgctattcccctatctgtctgaatttatcttactcagtcttaattctcttttcactggaaagttcctgtattgttttttgtttgttttttaactcaccccattacttccacaaccccagtcttgacacaatgttatggatgtagaagatacttcagagtccagaagttgatcttagacatttaataatggtttctaaaatttgctttaaaggagctttttgcaggtctatggactaacttttgccaacaattcctaggcttttgtttgatcaaaactgatttttcacttcttttctaagatatggtaaaataattttctgtactgagtgttttctaatatagtttattagtagaaaatttgagacacagtaaggccaacatatcagaaaacacctaccgtgaaaagatactaatattttattactttattaatactttatattattgatacgatatttataaccagccagcatcacacatttgtataaactgcttgtcttctctgagcattgaagttattttattttatataaatacaattattactttattaaaatacatgacatttatttactttattacttttattactgtggcaggccatcccacagggtgtagaccagaggtagggagctcagggaagcaccaggatctgtcaggaggtagaggggatgagggaactgtgggcaaggtcctttattgtagtttccatgggaagggataggtgcagcagggtaagcaggcttaggtctggctaactggaataattattccagtgagttctggggcacagaggctgatcctagttgtcttgtacctgattctgggatgaatagggaagacggatcatggtccagaagagagaaagctggataaaggaagcagttggggtgtggactctggattgattgctttatatttggaaagtgtgcttaccatctctagaaattggctaactctgggaagaccagtccctctagggtcagcaaggccccagatgtcaaagcattggagcacagagattaaaatacatggtcaggatagaggggaagttgaagccatggcagctccaagaaatgacacaggtggctgccattacccctgctcccaccctccacagctaccagcctccgtttactcatagggataattgattttttcctcaatattatataaattactatgaaaagagtgcctaaaaacaagttgcttatcactatttgtaactaaactgctatctttatatagtatcaaaatttggacagaacactgacaatgatattttaaatggaattagaaggtgaactgaatagagattttaaaaattccgaaataaatgttgggaataatttaaatcaaaagacattctgaggagtttcttgatgtctggtttctttcctcatctgtgtagcatttacttaggatttataattctagatagtcttttcgccagcaaaaaaactagattttgtgtggtcaaaagttgtagagctattttcagtaaacagcgaaggcgagaaggcgagtctaatttatttgactttttgatttacaaaaataaataaaaacagcttccacatggatttcctacaaatagattatatgctaattttcagaaattgttattatttctgcattattggatatatgagagttataaccctgcttagaaatagatcactctgattttctgatatcttgtgggtaatgagtggatgagagcgaggacagaatataggtgtgtgcatgtgtttgtgtgtatgtgtatggggggtgtatgtgtgtgtgaatgtccattttgggaggcatagggtacctcagtgggcttttttgtctcttcacgttgaataatgtgatatctaatgctataactttaaaaagttactaatattttcctgtgtctgttttttgtgattcattgggccaaccagatgattagccatttatggtttatcatatatacattttttatggagtaagtcaaaaattaaaatatgtaggagtcaattgatcttgcctctgaaaatcaataaccatttcagattagcatacaatgactgctctaaaaggtgtttaaaacttagtgactttaatcttggaatatgcaagttcctcattaatgcatttaattcaaaggaaattatatattctttatttaaactcatacaggagttcaatgttttggcctttgacttataaacaaataactccagtgtaagtataataaaagcatgttatgtttaaaccatttattcatatcagacactcatagttgtaagagttgtgtagccttaaatcatgtataaatctgtactcttagaaagtaaactgcacggtcacaggcatagtttagaggggaaataataacacagtggaattctccttttgccttgtttcaaacctaaatgatgtttcaatcagtttagaaagtgtttatgctgccaggaatccaaaacggaacaatccaaagcctgtatcctagaagagcttcaagtccacaggaaaaatcacgcccaaaagaagataacttcaatataatgtgagaagtaaaatgataaaagtatgcaaggaactaggggacaatagaccaaggctgtttcacacaggcaggctttctagtggtgaggcttatctgaggcttagaagatgcctaaaagtaaactagaacaagaaaaatggctgctcactgaagaaagtgagcatagcccgaggaaaggtgctatgtgaagtttgcgaggaattcaatccgtttaccatcaggagcacataaaaagaaagatggcactaaaaatgagcctggacgggaaggcaggagctatatcattgagggtggtataggccacactgaagaacctggcttttgatcttttttggaaagagtttatttcaaaaaggtctttccagcttctgtgtgatggttttaagacgggagagttccctggaccccttcacgggacttgcaacaagggtgtggctccatttctcgctcaagccccttttgggaggaggagcatgcaggtgagctggagcgagcgcttttgggccctggctccacggcagtgtctaggggtgttgcagtgctcttttagctttgccatctgtggatggttaagtgttaaccagttcagtggagagtcagggtgacagccttttataccctgtcctcttgatacgcaggtccttgtctggcattcagaaagaatcaggtcacatggacttgaaggatggtgaatgcagggattttactgagtgatggaggtggctctcagcgggatggatggggagctggaaaggagatggagtgggaagatgatcttcccctggagttcaaccaccccacggccattctcctatctgactgtccccagccaaacccctcttgatgtacagacgcttcctctcttctctccttctctgctgtgccgctcttctgttctactgctcgtctgttcatggagcctggggtttggatttatgagtataggatggggagcacggcaggccagggtggttttgaaagaagcaacaattgggcaggaaaacaggataactgttctcatttagcaccacggtttgcgggcttgagggcggagcctttgccggggaaccaccctcttgtctcctgttcatatcagttggatttaagagaaataagaccaaaggatgagaattggtcatttaacaatgttaatacaataggcaacatgtgaggtaatggtaggctcatgatagtacatataaaagtaaactatgagttttaaaaatatcaaagtgaaatatcaaattgaaatatcaaatttcaattaacaatcattgcacctcaaatgaactcattggctatatgatactgccactgcacaaagctctatatttcacaggtcttggaagtcgctaaatgtaggtaggcaaaaagaaaaaaaaaaaaaaagaagctcaagaaagttccagatctctggcttgagtgactggataatggatataataaaagtagtggggcccagagaaagaattatatgttgagcaggtagagtgagatgtgcctgtggaatatccatgtggatcagccttccaagttactggattggaatctaaatggtatgcagaaatgaaatcagagtcctttgatattgttgtcactgtcctagggaatatcaagcactgaaggggaaagcaacatattttaagcagaaatattgcacaaactgtgagatgctggccttcaggaaagaagagccttgaggttttttgttttgttccattttccccaaagtagaagtgattttcagattctatctctagatcatttttaaaggatctggagaaggctcatttgctactattactctaaattagctataatgacattttgaaattattttatctgtttaggtttatatcatagatacattgaaaaaaagaaaggcagtgggttaggaggaagaaagtattcagataaaagcaatgtgtagatggaatgagattgagtccaccagagttgtgtctgttctaggactgagtcaatttaaaataatggaatacattcttgcccaccaccacagctccccaaaagtaacctaatgttaccagtcttttcatctgactattgaaacctcaagtatatttgtagttgtagcaccaagatgggtcagcgagattcttgaaatttcttccaatctagtgactctaattttttaatgaagtatgaaataatagtgtttattataccttaatccaattaatagaaatatgagtgacaacattcacacattctacaaatatttaataaatattcactgtttttcaggcactgttttaagtgctgggctttagaatggaacaaaactaagtctcagaggagatatgctgtaaatatacaaacatcaatgtatcaggtagagataaattccataaaaatgaataaagctgcgtgaatagagaggaggtaaagttggcagtcacactttttataaagaatgatcaatgtatctaaaatattgacatctgacaatgaaaataatacacagatttgcatgtgtgtgaaacttgcaaaataagcaaattctatcttctagtatttttaaacttcagtttcagaaatgaaatgtatttcaaactcttgaagtgacttggtatttatttgcataaactatatagtattcgattctgtactaactggttaatatacatttttactatttttttagattcatatgctttatatgtatttgagaaatatatatgcttttacaaaatttaaagttccaaatttactagtttttaattagtttattttttataaaagaagtctttaattttgtttccttttttctctaaaaatctatataattttttacctttattgaattattatataattgaaaaataaaaattgtatatatttgagatatatgattccacaactctgtgatattctccccaaatatcaataatgcagtctagtcctaagaaaacgtcagacaaatccaaactgagaaagattctacaaagcacctggctggtgctcttctagagggtcaaggttatgaaagacaaggaaagaattggaaactgttgcagattagaagtgactagggaggcatcataactaaatgcaatctgagatcctggattgaatcctagaacagcaacaaaaaagtattagtgaaaccctggtgaagtccaagtataatctgtatttgagtgaatgccacttaagttagtattttcattttgacaaatgtgccaggttatataaaatgttaatattagaggaagctgggtgaaacatatgagaattctatctttccaactaccttttcagcttttctctaaatctaaaatttttccaaaataaaaagtttgtgaaaataaaaacaaaacttccaccacaatttttattgaagaagttggacatttaactaatggtacatttttagctaatcaaaatcctgttttagaaaacaaaattatgaaataaggtttaaaaaatgtacagtaacaaaaatcaaacacaaactatatacagtattatccatatgtgtatctatgtacatacgtaaagattctttatatgcaatttaaaataatcacaaatagtatattatcattggttatttcagtaaaaaatgaaataatgccttttaaattttttttctttaaacctttttgtttctttcggatcccctataaaagtaactgaaaacatttgatggggaaacggtattaaaagtaactcttgaatatttatttgttgatatgctatatttacatactttttaattttttcaaataagtagactacagtttcaaattatatattcttttataagtgtcttttattaagattaataaaaaattttaattaaaccatgcaatttccctgtactataaatattatatcaccccaaactcaaattattagtgtacattttggaccatgactaactgaaatgaaattctccctctctctctcccactgtctttattcttctcccttcctccctcatatatatatatatatatatatatatatatatatatatatatatgaattattccataccttatatagttggatagatatttaggtaaatatgtaaaatgtaggatatgcaccagttaagtacccattaacactggtgatttttcgtggttgggattcactctctactttctatatttctgtattgcttaatttcttttgatcaatagacatagtttgtaataaaatatatagcaaagatatcttttaaaattaaaatatcaaataaacttaaaattttaatattaaaatgtttatatggtaaacacttcttcaaattatcttattcaaagttagaaagtgaagactaaggaacaataaaatgtttttgaaaaagcgttttctaccatgatgatttgatgaattgggcatattaccagcttgctgagcttttgttaggaacaaaattgtggaaacactatgattttgcattcattttttgactagccattattgttcagattgcttaaacagttcaaccatacatatttaatcaccgcatcgaaaacttaattctagggagtgataagcaatcaggataatagaagaaaaaagtggcttgtccccaaataagcacagcgcattattagatatcaaatgaaattttaatctatttttgtaggaaacagagccaaactgtgatggatgttctttacattgttgtagaatatcccagactttttaaagagtacatggtatgtgttaaagtgtaaatatcatagattacttctagaaattttataattttcaagccagctctgagcttacatccacaagaggatgtgctgatattttggaagcatttaacccattcatagaataacaacttttaaattttgttttagatagatggatagataggtgggaaaatatgttgaaactttttctttttctttgtagggaatctaggttacagagaattttgtttcccagctgaccctgacaacttaccatttgtaaagtgagacttggtctacatgaatagctgtccttcctgtttttattaatatcttaggattgtctgaaaaaaataagccatcttcatcttttctgtcacattttctcattgctctaaaagtaagacaggaatgcattaacatttgcgtaaatcattactctgtacctagaactaaatgtgttttgatttagaagaaagtatagaggaggtgattcttgttccctgagtaaaagctcagggaacgtttacttcctgaaagatgaattagaaatattttatgtcaattaaaatatgctaaaggtgtataaaacaagatgtgtctattatttaactgtcactgataggaaattgactgcaaaactactgtctagagttcagaatttactgtcatctgtttttcttttattcacttttcaagataaaaagtatcatcaactgctggattatacgttctcctttatttctcattgcacatgaaaaagatattgccattgaaattcagctgtgacagtatataggattaagctgaagtttaattggctttgcagtgttagcagaagccaaaattaaacgattgattttttccctcatattaaaataaacctctgtgattcacagtctcagagaacagaattctgttgattaagaaagtctttttatgggcaataaagagctgattataagaattaaaatttaaagtttaaggtcatattttttctgaatgttttataatataacattgtacaaacttatttaaaagcataaatatttgagatactagcatagatattttcaaagtatgtgaaagccatcaatgatttgaaaggcatgcttagatttcattttattcgaagtaactgtatgcacaacaattcactttatagaattaagtaaactcaacacaaaaaaggagtggatgtggttctggcagccctgcatctctactgtggcccccaaaggaatttatttggtggtatgctccacttacaaggcaaaccaaagtgttcctcgtggtgattggagtaaacaagtgccagagaactaggacatgaaatgagaaaatatttctctgacaggctttaaactggctattatttttctccaatgtctccctctggagttctttagccagaccttacccaaaacctagaggctagctttgtccagacttgtaattctaaagttattagagctgttccgtttgactaggctttctatgatttaaaaatgaaaagcttacagaaatagtctattgaaaagatttttaacagtgaagatttgatcatggtaacgaagcttctatttgaactcaatatttgatttgaatggttacattgcattttgaatcattctatgaatcgagaatgcattgaccaatagtgcctaataaataatatcatctcatttttatttctggtgtgaaataaatagtagttatcaaatgaatcctcacagtcacatatttctgatcatatttcccattttttaaaaagtttacatactttccttattttaatctattcccctgaaactaaaattagagctgctgtagtcatacgctggatatttgttctttaaactcatatatggataagtgaagatatctgtgtccaatgtagtgaaaaaacaaacaatggtgcccaattctccattccaaatgcaaggaggtaataagaaatttgagacacactgcttcctaagaataaatggtaagaagtttctgaaaattcgattggttgtaaactctgaatactacaacaaggtttactaaaattgtggtgaaatataaaaaccatttaaaaaaaagagaatagcataaaagattacattccaagtgccttcattcttacatcaaagaaaacaactttttgaataaaatatatacttaaaatcatgaagaattatcattaaggaatcaaacatttaagtctcataatctgtttgagatttaaaaattttacgattttggtctaaactctagatttctaagttaagatttgaagcatataacccattgaatttatattactaattttgtaattaaagtaaaatgttcaactgatagagcttttatgagcatttttatcaatactctccataaaacctcctttaaaacaaacacagtaaatcaaaagaaggaatagaagaaaaacagaggactgtcaatttctcaagaaaaacacttacttaattctcatttattctttgcagacacctgttggaagtggatggtaacatacatggctgaactaatatgttatttttttttttgttttaggggctgatgttatcaactttgatggccatgttgtattaccatatagattcagaaacaagaagatgaaaacactgaaagatgtcattgccttgaactttaagacgtctgaaagtgaaggagtaatcctgcacggagaaggacagcaaggagattacattaccttggaactgaaaaaagccaagctggtcctcagtttaaacttaggtgtgttctgactgtcagttctattctttccgttatggatgttcccattaggaatatgttcatgttgctcaattctttaaaatgtaaattataaaaagagctcatgttatatttcaattcatacttaatctataacagtaggtatataatgaaacacctagtcattcaaaaaatatttattaaacacctctactatacaagttactatactagtctttggcctacagcaaggaacaaatagacaagatccttaagctcattaagttcatgacctaacggaggaatcagaccatatagcatttattattcttattttaaaacaactaagcaaaaatgaatgtcttcaaataatatatattatgaaccagttgaacagattaatatgataaagggactaggttaatacgtcctgttcaaaggcaacagggctaatattagaatgtgtggtgaagaaagactgctctggggagaaaatatttaagatgagatcagagtgatgaaaaggaattagccatgaaaacatgagagaaagaagattacataggaagagaacatggaagaccaaaagcacgctcaagaagcaggaaggatgccgccgtgcataaatgctgtgagttattaagacaaaagatgaagtccaagaggtggaaattgcccaaatcctgtgggatcctgcagggcattacaaattgtttagatattatttttaagaataggaagctgttggaagtcattaaactgtatggctttatcatcttattttttatcaagcgcattgagacttctgtaagaagaattacttgtgtagatatgagagtcgcagcagaacttctgcatagtttgggtgagagatagtactgcttgtatgaggtggttatcaggggagatgcagagaaatatgtcaattaaggaaataattttagtggtacattcagcatgacttatgatgggttggatatagcctaagaagaaaagagtagaaataaagaatgagccctaggatttgggcttgagcaccaaatggacattagtgccattttcagaaatagagaagactttaggaggaattctagagatcagtttggacatggttaatttgagctgcttatgaaacatctaagtagaactttcgattatggaagttgatatatgagactgagagaggaagactaaaatggagactaagtaattgtgaatattgagtaggagaaaatgaagaaagtgtagtatcacagaaatcaaggaaacaaaagaggttgtcaactgttgaattcatctaaatgtcatgtaagatgaagacagagaggcaaatattgggcttaacaacatggaggttactgttaatttctactctgtggaatagaaaagacaaattttgtaggtaaaaaagagaatgaaaggcgttaagtaaatattttgactaactagagaggaagaacagttagttaactgttaactagaaagaaagaacatagagaaatgaaatgttggctgctgaaagatctgaactcaaattactgttttatgtggggttgttgttatttgtatttatttatttatttatttatttatttatttatttacttatttttgagtcagagtctcaccctgtcacccaggctggagtgcagtggcatgatctctgctcactgccacctctgcctcccaggcttaagtgatgctcctgcctcagcctcccgagtagctgggattacaggcacctaccaccatgcccggttaatttttgtatttttagtagagatggggtttcaccatgttggccaggttgttttcaaactcctgacctcaaatgatccacctgccttggccttccaaagtgctgggattacaagccaccgtgcctggccctgttgttgtttttaaatggacaagaccaatgtatgtttgtatgttgatgatgtagctaggatttacttaaagctaaagtgaagatctgcaagattggtactggcattcaaaattacagtttaggcaaagtaatggtacctttttcttttttttttttaaatttaagttcatgaatgcatgggcaggatgtacaactttgttacataggtaaacgtgtgccgtgacggttgtctgcacagatcatcccatcacctaagtattaaggctggcatccattagctattattcttgatgctttccttcctcaccacctaaacctccgacagaccccatgtgtgttgttcctctctatgtgtccatatgttctcatcattcagttctcacttataagtgagaacatgtggtatttggctttctgttcctgcattagtttgctgaggacaatagcctccagctccatccatgtgcccgcaaaggacaggatctcattcctttttatggctgcgtagtattccatggtgtatatgtaccacattttctttacccagtctatcattgatgggcatttaggttgatttcatgtctttgctattgtgaatagtgctgcaatgaacatatgtatgcatgtatctttataatagaataaattatattcctttgggtttatatccagtaatgggattgctgggtcaaatggtatttctgcctctaggtctttgaggaatcttcacgctgtcttccacaatgattgaactaatttcccctcccaccaacagcataaaagctttcctttttctctgcagcatcaccagcatctgttgttttttgactttttaataatagtcattttgactggtgtgagatggtatctcattgcagttttgatttgcatttctctaatgatcagtgatgtagagattttttttcatgtttgttggccacatgtatatcttcttttgagaattgtctgttcatgtcctttgcccacatttttatgaggttgtttttgtcttgtaaatttaagttccttgcagaagctagatattagacctttgtcagatggatagattgcaaaatttgtttctcattctgtaggttgtctgttcactctgatgacagtttcttttactgtgcagaagcacttcagtttaattatatcccatctgtcaatttttgcttttgttgcaattgcttttggcatctccatcatgaaatctttgcctgtgcccatgtcctgaatggaattgcctatatagtcttctaaggtttttagagttttgggttttaaattaaagtctttaattcattttgaattgatttttttgtacagtgtaaggaaggggtccagtttcaattttctgcatatgactagccagttcttccagcaccatttattcaatgaggaatccttttcccattgcttgtttttgtcaggtttgttgaagatcaggtggttataggtgtatggtcttatttctgagttctatactgtgtcccattggtctatgtgtctgttcatatcagtaccatgctgttttggttacagtagccttgcagtagagtttgaagttgggtagtgtgatgcctccagctttgttcttttttcttaggattgtgttggccattggactcttttttggttccatgtgaatttttaaatagtttttttaaattctctgaagaatggtcaatggtagtttaatgggaatagtattgaatctatgtattgctttgggcaatatggccattttcatgatgttgattattcctattctccctatccatgagcatggaatgtttttccatttatttgtgtcatctctgatttctttgagcagaggtttgtagttcttcttaataaggtccttcacttcccttgttagctatatcttaggtattttatattatttttggcaattgtgaatgagagttcattcataatttgactctctgattgcttattgttggcttataggaatgcttgtgatttttatacattgattttgtatcctgagactttgctgaagttgcttatcggcttaagaatcttttgggctgagatgatgaggtttcctagttacaggatcatgacatctgcaaagataatttgacttcctttcttcctatttgaataccctttgtttctttctcttgtctgattgccctggccaggatagccaatactgtgttgaatagtcacggtgagagaaggcatccttgtcttgtgacagttttctgtggaatgcttccagcttttccccattcagtatgatattggctgtgggtttgtcatagatggctcttactattttgaggtatgttccttcaaaacctagttaactgagagtttttaatataaagggatgttgaattttattcaagaacttttctgcatctactgagataatcatgtggtttttgtctttagatctctttgtgtgattaatcacatttattgatatgtgtatgttgaaccaaccctacatctcagggatgaggcctacatgattacagtgaatacccattttgatgtgctgctggattcagtttgccataactttgttaagcatttttgcatagatgttcatcaaaaatatttgcccgaagttttgttgttgttgttgttgttgttgttgttgtatatccaccaggttttggtaccaggatgatgctggcctcatagagtgtgctagagaggagtccttccttttcaggtttttggaatagtttgaataggcatgttatcagctcttctttggacctctggtagaatgcagctgtgagtctgtctcgtcctgggctttttctggttggtaggctatttattactgcctcaatttcagaagtcattattggtctggcttagggaatcaatttctttctggttcagtcttgggagggtgcatgtgtccagaaattttccatttcttctagattttctagtttatgtgcatagaggtgttcatagcattctctgatggtacagagaatactataaaaataatagagaaatacaaacatatttctatagggaaatacaaatgtatttctgtgaggtcagtggtgatgccccccttacgatttctggttgtgtttatttgaatcgtctctcttttcttctttattattctagctaatggactattttattaattatttcaaaaaaccagtgtattaaattctcacactggtataaagaactgcccaagactgagtgatttattaaaaaaaaaaaagaggtttacttgacttacagtttcacatggctggagaggcctcaggaaacttacaatcagggccgaaagggaagcaaacacatccttcttcacatggcggcaggagagagaagtgcagagtgaagtcggggaaagccctttataaaaacaccagatgtcatgagaactcaatcactatgatgagaacagcaaggggaaccacccccatgacgtccctcccccaacacatggggattataatttggattacaattcaagatacgatttgggtgggaacacagagccagatcatatcaaccagctccaggatttattgattttttgaaggatttttttgtgtgtgcctctctattccacttcagtttagctctgatcttggttatttcttgtcttctactagctttggggtttgtttgctcttggttctctaattcttttagttgtgatgctaggttgctaacttgaggtacttctagctgtttgatgtgggcatttagggccacaaatttccctcttaacactgctttaactgcatcccagagattctggtactttgtatctttgttctcattagtttcaaagaaattcttgatttctgccttaatttcattatttacccaagagtcactaaggagcaggttgttcactttccatgtagttgtgtcgttttgagagaatttcttaatcataagttctaatttgattgtgctgtggtctgagagactgttatgatttcagtcctttttcatttgctgttgagtgttttactttcaattatgtcatcaattttagagtaagtgctgtgtagtgatgagaagtatgcatattctgttgtcttgggatggagaattctgtatatatctatcaggtctacttgatccaaagctgagttcaagtcctggatgtctttgttaattttctgcctcgatgatctgtctaatattgtcagtggggtattaaagtctcccactattattgtgtaggaatctaagtctctttgaagatctctaagaacttgctttatgaatctgggtgctcctgtactgggtgcatatatatttatgatagttaactcttcttgttgaatttagccttttaccattaggtaatgcccttctttgtgttttttgatctttggtgggttaaagtctgttttgtcagaaactacaattgcaacccctgcttttttctgttttccatttgcttggtacatttttctccatcctttattttgagcttatgtgtgtgtttgcatgtgagatgggtctcttgaagacagcataccattgggtcttggctctttatccagcttgccagtctgtgtcttttaactggggcatttaacccatttacatttaaggttagtattgttatgtgtggatttgatcctgtcatcatgctgctagctggttagtttgcaggcttgtttatgtgattgcttcatagtgtcactggtctgtgtatttcgatgtgtttctgtagtggctggtaatggtttttccttttcatatttagtgctttcttcaggagctcttgcaaggcaggactggtggtaataaattctctcagcatttgcttgtctgaaaaggatcttatttctccttcacttatgaagcttagtttgactggatgtgaagttctgggttggaaattcttttctttaagaatattgattattggcccccaatctcttctagcttgtagagtttctgctgagagggctgcttttagtcagatgggcttcccttagtgggtgacctggcctttcagcctttctctctggctgcctttaacattttttctttaatttcaacctcagagaatctgatgattatgtgtcttggggatgatcatcttgtggagtatcttactgaggttctctgcatttcctgaatttgaatgttggccttcttcctaggttggggaagttctcctggatcatatcctgaagtatgttttccaacttgattccattctcccggtctctcccaggtacaccaatcagttgaaggtttagtttctttacataattccatatttctcagaggttttgttaattccttttcattcttttttctctattcttgtctgcctgtcttatttcagaaagttaggcttcaagctctgagatttcttcctctgcttggtctgcctgctattaatacttgtgattgcattgtagtagtgtgtttttcagctctaacatgtcaattatattcctctctaacctgggtgttctggctatcagatcccatattgtattaccatgattcttagcttctctgcatggggtacaacatgctcctttacttcagtgaagtttgttattacccaccttctgcagcctacttctgtcatttcagccatctcagccttagcccagttctgagcgcttgctggagaggtgttgcaatcatttggaggaaaaggggcactcggctttttgatttttcagaattttttgcattgattgcttctcatctttggtgtcttatctaccttcaatgtttgaagttgctgatttggagatggagttttgtggggtttgttgttgttgttgttttgtgtttgtttttcttttaatagccctgtagaagtctggccactcatccatagggctattgtggtttgctgggagtccactcgagacactagttgcctctgtttttcctgtacctggaagtataatatcagcaatgaagcctgcaggacagcaaagttggcagcctgctgcttcctctggaagttccatgctagggataactgacctattgctggcccaagtgtgcctggaggaagtggttggagactactgttgggaggtctcattcagtcaggaggaatgaggtcagggattgacttaaaaaagcagtctggctgctttttgatagagccactgtgctgtgttggagatttcttcagcccctaatcggtttgggctctccaaggcccacaggctggactagctgagaagcctgaatgtccaagttggtgacctgccccacccttcaggcactttgtcccgtggagaacacaggcaggggtggccagaggccccagctgggacaacctgccctgggaagaagaatggatggggggatggggcagttaaagaaacagtctggtcacaccttgacaaaacagctatgttgtggtgaggaactgcctctgcccccatcagcttggactctccaaagcccacaggctgtggaatgactgaattgtccaaacaacccaggtggtgaccctcccctcccttggtcactccatcccagggatagaaaatagctctgtcatgcaggcaggtgtggttggagggccccagctgggaggtcccacccagtaggaagaatggatcagggctctgcttaaagaagcagtctggccatgatctggcaaagccactgtgttacgctgctggggaaaccttcctccttgtctggactctttggactctccaaagcccacaggctgcaaaggcccagtcgaccaaatagcagagatggtgtctgtacctctcctcgaggctccatctggtctcaagaaggctttgtcctgatgacagtggctggctgaaattccaagccagtgggtcttttcttgtagggtgccatggaaatggggcccacagaacaatgccattcggctccctggattctgcccccttcctaggagtatgtgcagacctcccgccttgcctgagttgcagacacctttgttggaaatcccagggtggagtttgtaaagctccaccctgtctctgtgcatgattgagcagttgttctgccaagactccacacagctctgtgtgtcagacccaaggctctggtgtcatgggctcacaagatctcctaatctgtgagttgcagaaatccatgggagaagcatggtttcttggggtcacatagtcactcactgcttcccttggcaggggttgggggttcccttggctccacgtcgctcctgggtaggctgtagccccatcctgctttccttcattctccttgtgtgaagttgtttccctaatccgtctccatgtgagaacctgaatatttcatttgaaaaggctgtatttactgatcccttccattcctctccttgagcactgcagacttcagctgcttctcatcagccatcttggcccctgtctcacctgtttctcttgattggctaaaaattctaggctatttgatttatttggcaattaccaatttgagtggtccaaacattcctgaatatgacttgtatctcatatattaacttttattactttgaaattcagtattatactaaaaattgcaacttcacttaggctatttttgtaggtaatgatacattaccttaaagatgtacccttgattataaaacttttcacattaaagatctgatctgatagacacaatagcttctataacaaagaagaaaagtcacacaaaattcgccatcacttagttacataaaatattattttttacattaaaataaaagtaacattaaaatgcatgcaaaacctgggaaatacaaatgtcaaatatactggtttaatataaatcatgaataagaaattataccactgcataataataccaagacattaggagaaaatataggcaaatgatatacaagataactcataaaagaaaaaaatattatataaacacccaatgcttaatttttatcaagtaagtaaatacattttaaagtgatactttcagtgttggtatttgacaaaatggatcctttgtattgttctgcaagtcagaaaatactttcaggaaaatagctagacagtatgtcttcggacacttgaaatctcttacaatacagtattttggtccaaaaatcataaggcaaaaaaagaaatgaccactaggatttaagtccaaatatgtaatttgcaacattaattacaatgtcaaaaattgggaaaaaattaaacacatagaaatatgttgatagcatttaaaatgtgctaacttttaattgtatggggaaatatataatattaagtaaaacttgtaggatacaaaatgtatcaatctatcgatctaattaaatatatgcagtcatgtgtcactttaaaatggggatgcgttctgagaaattctgtgtgagtttcaacactttgtaaatacaagagtctgcaaagacaaacgtaaattgtatagcctattacacacctaggctatatggtagagcttattgctcctagtgtagaaatctgtatagcatgttactgtactgaatactttaggcaactgtgtaaaaaactggtaagtatttgcatatcaaaaaatagaatggatacagtgaaaatacagtattaaatttgatgttaacaccattatatatgaagcccatcgttgaaagaaatgtcattatgtggtgcatgactgtttgtggaaaacatatgaaagaaaatagaccaaattatttttagaggtggaaatatttttgcattacatttcacttgtttcttcataatattctctgcttctaataacgaacgtgtattcattgtgctaccaggggaaaatagcctgaaattatttttaaaacaagacccaatagaggaaaagaaggaagagcagggggagagtaaccagaaacaaaagacatttttgttttttgtacacataaaaacattttatgtgtacttccataaaatatgcacacatgcacacgtgtgcacacacacacactgcagttgaattatatctaaagatgtttattttttcaaacttttcattttttatcccaaatgaaacatgtagagtaaccttttaaaatcaactgtggcttatagcagtgtgacattactgttttcaaagaagtaactgactttgtgaccttaccaaaaaaagtttattagctttacattggaaagcagtttactgatggagttttactgactgactggaatttacaacagccagggagaaatatccactcaaatatctactgccattctttaatgcagttacctaaatatcagacgtgtctacctgctgctcagtctactagtgtaaatatttaaataaaactcagtgtgaccttttcacttagttctgaattttcttcctctctcttcctcttcctcctcttgtccctctccttttccttgtctcattttacgcatacacactgatttaccatcacacatcaacatttgatttcatcaccataaaagaagaaaatatgttctaggaagataatagaaaatgtaaggtatgggggcattagcatacaaagggagaaaggaaggaaggaaggaaggagggagtgtgggaggggaaagaaagggagaggaaagaaagaaagaaggaaaggaaggaaggaaggaaggaagaatttagtgtgacagtcaattgtttatctcttatttccattatgctatttattctgaaaccctattatatttttatagtgattaattttgcctgaccataaaaagcaattcttgaatagacaacatagatgaaacaaactatgtaaactttatccagggatgaccttaataaatatgttagattctaacaatcttttacttttatttatagttttgttgctatggagatcttatttcagaactaaaagctacatatataattctgaatgttatcattttaattaaaagataacaagtaaattttctatgccattaacaattgcatattgttctctttacaacaatgtcttttggagtcaatgaaaattaaaaatggtcttgctatgtggtcttaataataattataacagtcataaaagattaacaggtaacagttatgttcactatatgccagaaagtgtattaaattctttgcctgtactaactcattgaatcctcatgcaaccttacaaagcaggtactattatcttccctattgtatatatgagaaaatggagaccaagcattctcaacttgtcctggaacccaagctaaaagtggagccagcatcagaacccagaaggcttctgtaaaagcccacgtgacactgactttataacaaacctaccaaaatttagcagaattcattgcacagtcataaaacactcattttccccctttttaaaaaagcacttttttccatgtttaataacttgtacgtactttgaacataaagtatttttttactattacattttattttatttatttatttatttttcttttttttcatttattattattatactttaagttttagggtacatgtgcacaatgtgctggttagttacatatgtatacatgtgacatgctggtgcgctgcacccactaactcgtcatctagcattaggtatatctcccaatgctatccctcccccctacccccaacccacaacagtccccagaacataaagtatttttaagtgtcgttacttactggtatcccaggttaactcgaatggatagagctttgatggaatgtcagcctctaggtgctgtaaatgaaagatcttctgcttcacagagttggccatagcatcattgcattgtttctttttcacttctgtgtacgcaggaagcaaccagcttggccccatatatggccacacatcagtgatgacaggaagtttgctggatgaccaccactggcactctgtggtcattgagcgccaggggcggagcattaacctcactctggacaggagcatgcagcacttccgtaccaatggagagtttgactacctggacttggactatgaggtacatgtgatgacgtagaaattgtaataaaatgtcaagcaattgtgtcactctcctactgtattgtattattgttaattatattactacttacaccttttttattttcttctctaaacaagacactgacaattttaaaaacctgattaattcgtttcattttatttctaaatttataatcatgagtacttgaactattataaaaatcttagtaccaatgtaataatttgaagagaggaaccatgctatccaggccatttaataaattcagaataaatttaatttgtaatcctttcattggtagttaatcatgttatcaattcttcttgagaatgtgcagtacattatatgcagagggttgtctaatatttattataaagtattgaataagaaatcttagtttctggtttatattaagtcatttagaaactcatgactgtagatgggtcttttgacaagctctgttttctcagaatcaatatcacaaaagcaataaagtaaaatacagactattttaaaaagattgttcatgaacaaaaagacatatattaccttctcaataattagagattaaaaataatcaatgatcacgtttatataaataaaaatatattctcataggttaaaagtaggtatatcatatttttaaattatttggagagcaattcaaccttaaaatatccattaaaactgttaatcatatacgtaggtgagctctttaagatgtttgtcagccgggcgtggtggcgcatgcctgtaatctcagcactttgggaggctgacgcgggcggatcacagggtcaggagttcaagaccagccggacaaacatggtgaaactccgtctctgctaaaaatacaaaaattagctggttgtggtggcacgtgcctgtaatcccagctactcaggaggctgaggcaggagaatcgcttgaacccaggaggtggaggtggcagtgagctgagattgtgcccctgcactccagcctgggcaacagagcaaaactgcctcaaaaaaaacaacaacgaaaaaaagatgtttgtcacagtattatacatcctaggagaaaaggataacactatacatacaaaagcagcagaacggtaagataaaagggacacaatgctattacttagccagaagtttccgaactttcttagttcatggagcccttagtgtcttcgaactttttccacagcagtcctgagccgttaggtccaaacaacctaaaaatttacgtcctaagactttggtagccatttagagaaataaacacaaaataaaagtgaaagtagatttttatttcattcttaaacaacagcaattattactaatgggatgagtgctattgcactgtacgactggcagaaatggggatcagatttgccaatggcattctaattttctgttccacttttactctacatgatactctgtcttaatcagagtaatgagagtaatgaccaaatccaaaattcacaaagacagcacatcattaaaaggaatgacacattatctaatactggaacagtaaactaccttaagctagagtttcacacaatgtccaaaaggtgtcaaatattgttgtgttttctttaaaaatttcaaacatgctatggcacccctattagttttctgcaccaccttcatgttccttggcacccagttctgaaattggagatgtattcatatatatatgtgtgtgttatgtatatttatgtataattttataagaatatggaatatgctcatcataaaataaatggaaaaaacaggattaatagctgtgttttctattatctttatgtttaaatagtttctagttttttgcaatatgaatatacgatatatattcttaaataaaaaatttagagtagaatatgctatataaacactgatggagactttattaacattaaatgaatttaagattattggaaagtattttatccctccccctaaaaaaaactcttaaaagcaaactgattgttaaaagaaaatgtatgtgaacatcccagaaatttctatcttctctaaattagtatgtgtcttggctcatgtgacttatctcccaatgtatgagagatcttaaagatgaattattcatcctctgttaataaactttgaagtaccatagaagaggtgaaaattctggaacattaagaatgaagaaatataattctaattttcaaaaaaccaaattaaaaatttggggtcataaaccctgttgagtgtgtgacgaagtctatgactattcacgcacacacaacacttgctatatcggatcagcagtttcatggacactttgaagcccatctatatacaatgtcgtgtttgagaactgcaggtatagactaaaatacctggaacttatttattagacagaaacagtaggaagaaatttaaattaactgacaaagaatcagggtagacttaccatttctggctactgccagattatggtcctcttagagactgcaattattggcatgaaatgtaataaaagtggctgtgcttacctttatattgctacacttttctcttaatggaaagggactccctttgcttatttgtttagaaaaaacctcagggactgggccaggcatggtggctcacgcctgtaatcctagcactttgggaggccaaggcgggtggttcacctgtgctcaggagtttaagaccagcctggccaatgtggtgaaacccccgtctccactaaaaatacaaaaattagccaggcatggtggcaggcatctgtaatcccagctacttgggaggctgaggcaggagaatcacttgaactcaggaggcagaggtttcagtgagccaaaatcatgccattgcactccagcttgggcaaaaagagtgaaattccatctcaaaaacaaaacaaaaaacaaacaaacacctcacggactgtattagagtcagtctctagttttgttgtacttatctccttgatatatccacacactaactatactcaaacctcacagactgcatgaaaattagcttcaaacctaaaataatacaaattatacaacattcattcctgaactatttaaaggctttggcctaaaggaagagaaagctcgtcttgttatcttcacaaaacctgaagatgcaatgtcctgcttccccaagattatactgcctcaatcaattcttccagagtacactaaggacaaaggcattgaggcccaaaggtggaggtatgctggtaaatgcttaacaaccagctctctccagggaggaatggtcaggaatgccctgatatatagcatttgttaattttcatggtgcgaatttcccaccatggttgatttcatgctaccatatatggaactgagcagggagttgcaaagaggtgcctaatagcactatatgacggtatttccatcatatagttgcaataaatataaatgacctcaagaacatatacgaaagtaaagtgtagagataaattctgaataggtatgaattttgtgtttcatgtaatttacttaatttatagcttatgtagtggaagttttaataatagctctgcttagcagtcggttcttgtgaaccagtatgagtgggattcagcacagcactgctagcgtaaattaaatatacttaccacaatttctggagatgaacatcatgaaagaagtgatggaatacaagttcactcctttgatgtaactctatgtggacatttcctttttttcctttttttttttttttttttttttgagatgaagtcttgctctatcactaggctggagtgcagtggcgcgattttggctcactgcaacctccgcctcccgggttcaagtgattctcctggctcagcctcctgagtagctgggactacaggcacctgccactatgcccggctatttttttgtatttttagtagagatggggtttcactgtgttagccaggatggtctcgatctcctgacctcatgatccacccacctcggcctcccaaagtgctgggattacaggtgtaagccaccccacccagccctaatttttgtatttttagtatagatggggtttcaccatgtcgaccaggatggtctcgatctcttggcctcgtgatctgcccgcctcagcctcccaaaatgctgggattacagacataagtcaccgctcccggcatatatggacattttttgtgacctagtcctaagagtttgtctcatcccctcctcttgtagctgcctacactgcaaagtgggccaatcaccacctgcaatgaggctgctagctacagggtggcttgagactgtgtggtgatatatacgtgcacttcacttcatttttcctcagcgtagtcaataaaaaccaaaggggagagcagcaaaatggtgtttggcttagattctctctgttcttcagaggacacccactgtggatattatgctgttgtcttttgcaatacagctctgctagggaagtagaggaatgactctcttgaccattgcagaaccacagactgcctaggaagaaaatcagtcacaggaggagaagcccgagtttgaacctgtttctgccctttaatggttgtgtgacagtggacaattcatattcccctttgatgaaatgaatctaatcgcattctttccatagggtttatgaggaggcaacaggaagtaatagaaaaaaatgtgtgtgagttaagattacataggctacatttaatggatgcacgtttattctcctttatgtaaaagaagactggaggcaaatggctgctccacgatcttcaagatcacagtcctttttaatcttgctcttcctctatccctgttgcaaatcactcaaagacggctgctaacatttcactttgcacttcagctagcaagaaggaagagagagtaaacaagactgtgtcctccccctcttaatgacagttcttagaatcgcatacagcccttccacttaaatatcatgagaccaaaactggcttcaaagaagttgataatttattatattgactggggagcaatgtgcccagctgaaaagcattattttttttccctaatgagggtaggaagaaaggatatgtagaggtatccaatagtccctgcgacattttgtgtacacttgaaagctaacaaaatcgttactgcagttatttctttagaggcaaggttattggatggcaaggtcattaataaatgtatcatatgagccacaggaataattgaatattaatcggacaactgcaacaatatttgttactatcagcttcgttaaagtgtcagaaaatattctgtggtccaaccagtttattttaccaatgagaattttattttattattattaatatttgagacggactctttctctgtatgcccaggctggagtgcaatggcaagatctcagctcaccgcaatctccgcctcctgggttcaagttattctcctgtttcagcctcccaaatagctgggattacaggcatgcaccaccacgcccagctaattttgtatttttagtagagatggggtttctccatgttgatcaggctggtctcgaactcctgatctcaggtgatccacccgccttggcctcccaaagtgctgggattacaggtgtgagccaccatgcctggcccaccaatgagaatttataactagaaagaataaatgacaacctaatatcctataattagttaccttaggaattggggtcagaattcactaaattgttcggatctgttaacttgagcctgcattgcttttccagagcaccttgatgaggtggacttgtgcctagagttgctgaaaacagggaaactgtaaggataatttgaatcccctgcagaaagtgaaaggtccgaattaaagaaatatgcacacagaggaatatgtatttaataatattaaacattgacggtattattactgtcagttggggaaaaattgttcaaaaagattgtaaacaggagacgtagtactccattttagtatcaaaaatgattgcctttggtactaggcacacttaggtagtacctaatatgttcatttcagtgcaacttgaaaacattttcccaataattctactttagattactatttcttctttgtagttttctgattctttgggatatatttttcctcaattttccttttaccttcttatatatgaactgtgtggcaaataatacatattcagctaaccattattaataataattgattttattgtaaatgaggcctttgtttttttttttaccatcacctcataaaccacaatttgtgtttccccccctaaaagtacttaagcatttaagatgccataacactaaatcatagaacataatttgttcatggaccttccagaacacagaatatttgacttatgcttcaaatatgaagtcgtgatttttaaaaatgtcttcactgttgctttcatttcaccccatcaaacatgctctggaaaagcaccacaggctcaagttaacagattcctaaccatttagtgagttctaaccccaatccctaatgtaactaatgataggatattaggctgtcattgattctttatagttatatattctcattgaaaataaagtggttggaccacagagcattttctgacattttaatgaagctgatagtaaaaaaaatagataatggtaatattgtatgataatttaaaagatatatattacaagtattgtatatcttgatattataattagcggttggcttcatttactactaattcactattcatagtaaatatcatccttgaccatgcaaatactaaatgcaattttgtatcatataaatttaatgctatagtgtatattgatcaaaaatgtataagaaatggatattttctttctataagcgatagcagccagagaaacacagtaagtagcattgtcttatttcttaagatttaaaagacctataatatctttaagcctacacagctcaactttgagttcccaaatcctaagtggtccctaatcaatattgtaatgatattttttgaactattttctacatccaaaataaatctaatgaatttttgacaataatggtcattagactacaagtctgcatagggtaaatacgatatcccttgctttgggctgcagttttatcagcttattaaattagtgctgattatctcatgcttactggaggcatttattgatagtatgtctttgaatgataaacataaaaatatatttctaatattatttgatacaagaagtttgctgaataaaaatcttttaaaatattctcaagaaaatttataaaatgcctttggggcagtaaaattgcaaaggatcattgcttttttttgttcaagttataatctaattatcagaatgaatgactccattagacacttcaacaacaacataatttaatatgccatagattttggaggcagaatgctataatatttgtatattttggttgaggtatagatacttgaccttcactgtattcatagttttgtctagttcatcataatacaatgtggacgtttacatttaatttctttttctcaaagataacctttggaggcatccctttctctggcaagcccagctccagcagtagaaagaatttcaaaggctgcatggaaagcatcaactacaatggcgtcaacattactgatcttgccagaaggaagaaattagagccctcaaatgtggtaaggattttcacccgcaaaatattggtctataaaatatcaagtaacatttttgttttttggattattgaacaacaacaaaatcatgacatttttcatcatatttgtgtttgggcaaaatgatgtaaaacaaacattagagttatcagaattagtatagatacttgctattctttgagaatagctaatgggactagcttgaagtaggtggttggttttattcccacggagcacagaatgttagactcaatatttctggatgactcgtggcacgtgcttcatcccagcagttagcagcccttaaaccggcagcatcgtgttttcaaatatctcatcacatgtgctctaagttacttgcttatggtttaatttaatatttttaaagtttttaaatcagggactttattatatttactcctgtgcttccaaagatgatttgtttgaatatgtaaataaatacactttttagcaaatctctaaccagactaaatattacacagttaaataaagcttgatttccactgcatagccaaagctgtgccacagaagttcacagtgatttttttctgccttttgtgtgagttggtgccaggtttcattagattttggaaggagagcaaaagtcaaagaaagccccagcacacatgcttccaaacgacactactccacatccctaaaagacacttagtttgcaattttagtatgagagttccctatggctctgcaagaccaggagctgctttagcccagagaggctatttgggagagcttagaattccagagacccatacaataagaagatattatgcactataagtacaataatgtcatgagtgtttgcactgtgctccaaaagagctctgatggtctcgttgcctcaaatttgagcccagggtttcataaaatgatttgacaaatggaaatccctgaatgaataaacagttcaggttgaatatggaaggtttaaaacaataacttcatgcaaatgattatttaataaataattttcttaaagtaatcataaatttatactagaaattaaaacttgaactttggttaaattttctcataaagtatattgactatggaaaaataataatagctccatttataggcaacaggtattgtgctaggcaagtcgtattttatatttaggatgatctgagaacaatactgcaagaaggatacaaacattttgtagatgaaaacattgcgatttaacatggaaaaaataagttattttatgagaaaaataacttttattttatgagtaggagataaaaagatagatgtatagcctggtatagtgggttgctgctgtaatcccaacactgtgggaggccaaggcaggaggatcacttgagtccaggagtttgagaccagcctgggcaacatagtgagaccatgtctctacaacaagttaagaaaattaaaattaaaaaaataaatcaaattgaattaaaaaattagctgggcataatggtgcatgcatgtagtcctagctgcttgagaggctgaggtaggaggatcacttgagcccacaagtttgaggctgcagtgagccatgattgaactactgcattccagcctgggcaacagactgagactctgtccccccaaaaataaaagaataaaaaaagattatggattcacaatatgtgagtttgattatgctctataattacattttattttaacaaataattgcagtgagaaaacatagaataaacttttgaatcaaaatatacatacatacagaaaatcttagatgggatagagacaaataggacattttgcaagcaaccctgcaaagacaagtgtttatataagaaatgtactttcaaagatgttgggtgctggtatttcagtgaaattgactgagcactcattctacctcctcttcccccacatactcattccctcattatgcattgactccaaagtcagcaccgttactctggaaggatctttaattttgctagggagacaatcccctcaaaagaggtatgtggtcagttataaaatctcaattattatgcataggcagttctttttatcagtaaaagcgagcatttaaaaataatcatctgtgatggtacagagcaaatttaatttgaatattaattcagagagactgcctgccttagatttaatggttattgtgctaaaatggaagaaatcagcatcaggtatatatatatatacacatatatatatgtgtatatatatgtgtgtatatatatgtatatatgtgtatatatacacacacatatatataccatatacatatatataccatatacatatacatgtaccatatacatatatatgtaccatatacatatacatataccatacacatgtataccatatacatatacatataccatacacatgtataccatatacatataccatatacatatatatggtgttgttaaaaatatatagagaaaaagagagacagacatagagatagaaccaatgaaaatatcatccaattacattccttaaaatattatgataggataaaagaagttagaagcaaatacagatttttagacctgtaaagagaatgtagttaggcactgaaatatacaatttagtgtatctgaatgataaatatttttttcttttttttcttttgcttataccaaggaggaggagtatagaaggggaggggaaagcctgaattattgcaaattttatctccatttagcccatttatagtgctagttatacaggaattaatgcattgtgatataagcacaattcatgggaatttaaatgggattttgagttggatactaaaataatctccaacaaccacaattacattaatgctgaaaacttaatatctatctatctatatatgcatatacaaggtatatagataaaaatccaaatatatttccctaaaatatcagtttcataaattgcaaacatatgaccatagtccccactgagaccagagtaatatgttaattaatgttggcattgaccacccagaataggacagagcatctctctccctgacttatgttcggccagcagtagctttgctgtcttcagaaagtctagtgatccacagtcacacccacaacacacatacacactttacaactcatggtcagcctatcacatcaggctgtctggctgtcaatcccatggtggaagctgcttgttatagttagacagccaactgctgctcagtagtaggtcttacactccaagtagatccgtagtggtgcatccagtcactgaatccatgctctgctgctgtgtgtgagtttagcttaggctcaggctgtgcttcaaaacttgtagaactatactttcatcagtggtctgacatggatgttcattttattctgtgttttcctcagagcctgtctttctattttacagggaaatttgagcttttcttgtgtggaaccctatacggtgcctgtctttttcaacgctacaagttacctggaggtgcccggacggcttaaccaggacctgttctcagtcagtttccagtttaggacatggaaccccaatggtctcctggtcttcagtcactttgcggataatttgggcaatgtggagattgacctcactgaaagcaaagtgggtgttcacatcaacatcacacagaccaagatgagccaaatcgatatttcctcaggtcagtgaaacctatttgacatttgttcctgaaacttattgcaatttccagagttaatgttgtgctttgtttggttttgctggtgttacacgctcaggattaggttttaattcagatcttcaagacgcttacttggttgtagtgtgtgctgattgaataaagaaaacttggaaagttgttgagagagcaaggcatgggtgaaggagaaaattggttgagattggaaaagcaaaatctattccttaccaatgctagtttatttttaatagataaattgctcttcttttaagtgaataatttatgtttaaaaacaaggaatgtttattttaaaaacacaattgtatctggtatcttttctctttatcaacattcgtgtaccttttactattagtaacaagattatactaattttaactttaaggaatattccactgctggaatcagaacttcaaaatgatcttgctaaaattatgcaaatggttggaaaagaaaacgaaagtgaatataaaggtggaatgacaagatttgtgtatcaactgacggaagactggcttaggcaaaaataggataattttaaatttggctttgtagtgatatgacaaatagaggcttaggtaatattcttgttatttgaatagacttcgcaaccttggaagttctttgataaatacagtacaaagaaaggtgacattgtaaattgtgatgttataagcaaagaaaaattagtctcaatattggactgataaatagtaactgttttcatctatttttcttgagatagtctttgcaatagtcatacatatatattgtgaagaactacttagaaatgggagatacaaagaaaactaacatttactgaacacttagtacagatgtagcagatactgaaaggagtcatgacagagagctcaattgggtgaccatggactctgatttctgaatatgccatatactctcatggcaccctatgcatatacctgacacggtttctaacacactatgatttttgtccctctcttttcccctctaggctccatgctccttgacagcagggaccatgctcctttttcttctgtctctggcatatagaatagtacctgtaagaggtgctctccaatatttgttgaattcaatactctgacccctttcaactaacagaatatcccctgctatagaacatatatattttcttgtaaaataggctttatgtttgtgtgtggcctgaatgtatggtctattactgaaaaggattcaaggaagccacaagaaatgttatgtcagagatgtgcctaaattattgaaatcaaaggtattgggaaatacctagttattcactttctccatttctgctttattagttttgctttttccttgaatgtctagtcaaaatgattaatcaaccatattttatcactacattcgtttataagtatacctagggaggtttacagcaaatcgaaaatatctggagagaccagaaaaacagataaaacaaaaacaaaagcaaatgtttgccacagttgaaaaactcccacattatattgttatgattaatgattattgcctaatgactaaacataaaaatattagtatgaaggcctgtctccttgcagtctctgagcaaatccgatttgctggtgggtttccatgtaacaggagccaatatatttgaaaggataagatattaaccctagtggtcaataaacatgtattaatttgatttggtgtaatttagtactccaagatactctcacctaatttaagctgtgtttattttgaaaattaaagatagaatgaacaaagaaatccaatacatgacagttaattcaccttaatagatttgcttaaacctaataaaaatggactgaagagtttttgtcaatttagccaagaatctgtgcaaattaattgaaaagatataaaatctaaagatttccgtagtattacccttctataatccagtgaaaataccttactgcttcaagcattttatataaatatatatatatacagacatacatacacacatacatacatagtggaaactaagtgctcatatttgagaaacattagttgaaaaaaaaattcaaccatttaaaaaagttatattttatattcattcattcaatctaaaagtacatatggaaaccataggacataatttcctctgtcttttaatgtattttatcaaattcaattaaatgtgtaaataagttagtaaagtggcaacactgagaaaacagttaagtcaggattctaatgtttgctttaacaaagggaaatatatctgtatcacagctattctactcttatcagcatgagcattgaagaatgtcagtccacttctccttttgtcaaatattttgattgaaagaatttagaaaatgcagaaaatctagaaaagaaaaataaccagtgataaaattttggtgtacacacacaaagtagtgcactgagaaggtaatatagagactctcagatactgttaatatatactggtaacttagtttttatttaataaattccatggtccaggatgaatgtaacccaattagatcaaaaacctttttttccatcttggtcaacactgttctttgggaattaatttaaaatattaaatacatcttacaagtaaaataatgtttaatatattgttcaccctatctttgtatctttctttccaagttgtgattactgtcttcaagagtctcattagtaatcaacagtagacttgacttatgaaattcagtcaaactcagtagccttgaatttacagagtggattatcttaccatgaaaatattgaacaagttgcaacatcaacgttttctgatggatagccaaaaacaaacaaacaaacaacaacaacaaaaaaccctacttactttttgaaataagtttttatttcaaagtgactcaattttatcccagtacatcattttttaggacagaagttactgatttatgaatacatatttaggcattacttttaactaggcataaatgataatattaaacaggtgcaaaaagggtctaatgaataatagctgttcattctgggcataattttcattttaactttaaaattcaaaactctggggaaggtggacctagaaccatgtttttcaaataattttgatcaaagtacagtaagaaaatattttatgtcatacccaaaacctactgacacaaagtttgatgaaataaaacttgccttgctattttagatgcactatgataagtgtgatattttcttttcttttgctttattcttaaaaaaaaaaaaagccataacccactataataatttcatgtcctaaatacagtttggaaaacaccgacctgacctgcattctttttcttatttgaagtgttggaatttttaaaagttttagttgcctggaagtattaactccatcactctatattggaaaactaaatttgtcttatgggaacagtattataatattataatggtagtaaaaaagcattaatgtacattactatttgaattatagcaaaaaaaaaaacctaccttttgaagtaagtttttatttcaaaatgcctcaattttatgccactaaatacaaacatatttagaacaatactcagttgtcgtctgccaatattaacaaggtaatacaatgtgattcagcatttattatagtggggagaaagtgatttatcttaatattctctctcagttattggaaaaaaattaacttctctccatgtataaacaaagcctttccaaaaagtcattcagaatatgtcctgtcctaaatcagctgttttcttatactcaagtattggaacatccttgttttgttaatgtaggtattgcttcaattttcgaatggctgttcagtgtccacactgtctcagaaatatgtaatcagaaaagattttctcatttgtattttcatctccaaaggaaatcttctgtggacttgttttatttactttgcttcttagtaaaatttcctttgtaaatcattgtgttccattgggtgtctcaagggaggagtgggagttttcttggttcagtgtgtggctgggagcatgctgggaaatagttctcagttcaatctgggcaaatgtgtttgggaacactccaggcagtgtctattctaagcaattaaaatatctctgttcttgattttatgaacacttggaaatgtagccagcatattaatatttctttaaaaaattaatttataccgttttccaaagttcagtgataacttgccccatgagacatccttttcatcatatgagaaaaaaggtctcatttgaaatacaatttttgatgttttagttgtttactgaaaattttttttcagttctatactgatattatttcaaaatgtcttaaattcttgtaactcaaaaactaaatgtttcagcattactacaaatactttaagagatttgttttattatgttttacagcaaaataattggagacttatttaacaagatatgttctctaattcaagtttaaaccatatttattagaagccttaaaagatgttacttccctttgatccattaaatttaagtttttctgattctaagaaaataaagaagcacccagagttatttatcacaacatatatacaataaccaaagtaattgaaaacaaactactgaaaatggacatgtgattttaaagagtgtatttttatgtggaatactattatgtcattataaatcacatttcttatataaaatttaataacatggtaaaaaatgctaagaataaaatttttaataaaaacttaagtagactatgaatctaatgtcattattataaatataggaattttatttcattccaaatcagaatgaaataatataatactaatgttgatcatctctaattggtgggttatcagtccattatattaactttttaatatattttctctaatatctatattttctccaataaacatcaattgttctcagaagtcaaaaacaatatgctacaaaacaattgaggataaaatgatatttctgaaaagtatgatgcttaacaatgttacaaatggaaattaaatagcatatcaatttaaaaattctaatttccttacttagaaacatgtacagccaatttcttaaaagtttcaccttaaataataagcttcaacagaatttcaattgcatttacatacaaatggagcattttataatcaggtgcagaaatttggaggttgtgtctataatgtttaattatttgaaaatattcataactcattttgaacaaattccgcaccatctatgtaattttaaaactatttttcaacctgggtaaataattggatagataagtagataaatgattggaaaatagatagatacgtagatagatagatagatagatagatagatagatagatagataggtagatagataaaaagtattgtcccttaaaactattgctagctatcaggtaacaacatattcctttttctcaataaaggaatagattgaataaataaataaatcatcactttattcccaaataatctacatacaccatacttttacaaaataagtggctaaaaagtaatttttagatttttgtaccttttgatgggcttgtagatatctaaaaatttccggtaaaggcaaatccatcatcttaagatacaaaagataaaacatggctctgtattcttagggcgaaaatggagcctaagaaattctgattcatagagcactgtactcactttaattaggagcctagaactgagctggaaaggaatagattctattgtttggtggatcccaaaagtgagatagataaagatctgagtactagatctaaatagacacatagaaataagatacccttggacatatctaaaacatattttgctgattttattccctgaaattcacaaatagacttgctgtgagagccacatggtaccaagtaaaaggcatttgagtcaatggtatgttgctcctgggtagcttcacccaactgactttttattatatatcaattcctagtgtggctgtaccactatcatgcgaactgagtggaaatctacctttaattatactgcagtgaatgctggtgcacatttttcatcaatagaagcattatagtgcagaatgaaaggaaaaaaaggaccgggggagagttttatgatgttagatattgacttattctttagaaagcaaaagggacattttaatttataatcacactccaggacaccatttccattctagtttctacaatatttttgagccttttaaaatgttctatgcctttttcagggaagatgaataaaacatgttgtgtgtatgtgtgtataataattttttaaaattccaaaaaggcaataaagttttagtaactttgttggataaaatggaggcaaaaggtgccaatgagaaccagactgtgtttcaaaagcttcagtttactgtacaaataaatcgaagagaaaaaaaaatcagatatcactagttgatactaagagaataaaaatgaattatgaaagaatagcaaagaacatagcccaggaactccaaaaataatatatgcatgtagttgaagatgtttctaagacaagaacagggaggacatagaagcaaattaactttgctgaaaagccagtatatttctcagttaacagataatattgtatctacttaacatgtacagaatgatgtcctgaagtacatatacaatgtggtcctttacctttcatttaagtgtaagggctgacacttcatgtaaggttgaaacttttgtagtggataaatgagtaattggtaaatttaagcaatatggatttacatagtagagatatatctaagtcaactttagatgtttttgcaattgcgtgtctaattttgtttcaaatagttaacaaaataaatagtgttggcatgaaacaatcagggatgatgtaccttcataatcagaaaaaacacaaagcagtcattggtttggaaccttccccacaccacttcccactccccccattaacctcatgttgagaattaccagggataattaacttgaccaggaaattcagactgtgagatagtatcattgcccagcatctacctccctcaccttttaatttttaagtaatttgggaagaatgtaggctcattaggttatctgttgcttggttgtaactagatgtggaaatcagccttcttgggggagggattctgcagattctgtgagcctctgaaagtgacttgggatcagctgaaagaatgactcctttggaaactcagtatcatgtttagccacatatatttcttagtctctttcctttcttcatcaaggtttttcacaagaaaattttgggagagtcattcaacatgcatagaaagtaattacctttggtaaacatggtatcaggaaataattatggatatggccccatctgcaatcatgactacattttctgacttattttattctgatatatttcccttgaggcttttctaacctgagctcagaccctacttctgggaactgaaattctgtgctatttctgagtcctctttcttctctccagtcagtgcttttttcctttcattcattctctacgattcaattttataattacagttgtgcctagattcttactgtagcgcttggtagactctgatgttttctgaaagatactgatgacctgcctagatgtctgttctctctacaatcacttctagtctttcttctagcacttccaggctttctgagtgtctttccgagattgaatctctattgctgaacctctgtccagaggccgagatcttgctacccctagacgtacaacctgctgcctgttccctgcctggatattggagtactgctcacctccaatttcccaggattctctccttccctcattccaatcctctgctattttatttttaaccctgacatggttgacttgattattttaggtcataacttcctcttgcctatgaatattgcttacccttttgggcatgaattttaactacctcccaatctcaactgctgctatcaatccttgtgcacacctgtgccaaatctcagccacccctgtattctttgtcatcaaattcctattgcttcttggaatgcaaatctaacatatagtggattggggaaaactacaagcagaaaactagtaaagttcacatagtcccctaagatcttagctttggttgagcacagcttgtcagctaaccccatggccaagatcctaggatcgagagacctgcatctgtaatgctgtacataattttatgggcaggggccagaaaagttgtcctgttaggaaaggagagcctctggagctcattggtagttatcaggcaacttctcttttgtgctccctcagatctgctgagctagctccttgctgtactgctataaaggctggcgagaatgagactccggggccatccagatatgcctcttatctactgctaagattatgatgacaactgtgataatagataataactattgaatgcttacactatacctgtcactgtgctaaagcctttgcattaattatcttgctatggctccaataacctcgtaagttaggtcctgcattattgagaaacctttctatctcatttatacaaatggtaaagtcattcttctggtgacacgagttcaaaactttgagaaaaatcaaattttgccttttatcttttcctgacacatgcgaagatttaacaatcaccacccttcttttaaagtgcctcattcatccattatctctttaccctaattcaaaaattcataccttgaaaaactaatcaagggcatcttattgcctaaaagaatgtttatcttcaattgctgacctatttgttagggtataggcgttatgagcatggactctggagccagattgcctactggctatcatggattgagttctttctctgtttcagtcactgttgaaacaaacataatgtacacaacggttttaagccatttaatgcttggaacaactccacaagatgaaggacattatcatctgcatttcatagattaaaaaaaaacacaggaatagacatgagtaactcaccagggcccctttcagctagtgaatagaagagctttaaaaattgcccagagcatttgagtctaaagtcactaaccttggccactacctctcatattcatgaaacactttggtgttacatgatcacacaggatcaggtactgtggaatatgacacatctgaaatatttgttgaaggcagaacctgacatcaatgatgtccttatcatgtccattggggttctcacaggagcattttaagtaatctcccttatgtttctaattctgtctcccatattatccaagtttctatttctacaatacaaggaagataattcaatagtttcccattactaaagaataagtcctgagactttgctgaagttgcctatcagcttaaggagattttgggctgagatgatggggttttctagatacacaatcatgtcatctgcgaacagtgacaatttgacttcctcttttcctaattgaataccctttatttccttctcctgcctgattgccctggccagaacttccaacactgtgttgaataggagtggtgagagagggtatccctgtcttgtgccagttttcaaagggaacgcttccagtttttgcccattcagtatgttattggctgtgggtttgtcatagacagctcttattattttgagatatgtcccatcaatacctaatttattgagagtttttagcatgaagtgttgttgaattttgtcaaaggccttttctgcatctattgagataatcatgtggtttttgtcattggttctgtttatatgctggattatgtttattgattttcttatattgaaccagccttgcatcccagggatgaagcccacttgatcatggtggataagcttcttgatgtgctgctggattcagtttgccagtattttattgaggatttttgcatcaaagttcatcagggatattggtctaaaattctctttttttgttgtgtctctgccaggctttggtatcaggatgatgctggcctcataaaatgagttagggaggattccctctttttctattgattcgaatagtttcagaaggaatggcaccagctcctcctaatgggtgcagcacaccaacatggcacatgtatacatatgtaactaacctgcatgttgtgcacatgtaccctaaaacttaaagtataattaaacaaaaaaagaataagtcctgatttcttagcatgccacacaagaacatgcacaaactatgctccactggagcatttggcctcatttctcctactttgcgtcatattgactactttccactccctgacaaggatttccttctctatattccatcctagcaaactgccatttatcatttattgcccaattttagtatactttccttccccaaaccccaggaaacaatctaccatcctctagtatagtgccttgtatcttgaataacaattattttttgttacatattaaatcacatactcctctactattatgtctccctcatatctgtactcctaacgccactcatgtgtcaggaaataggtaatcaatactttcatctttgcttttttggtttgattcacacctagactgttgcagtttccttgctcttctctctgcctcctgcctctctaaacaagtccattccacacatttcctcctgattacaatttcaaaatgactgcttccattgagtcatgttcccattcaacaatctttcatgaacccccaagttttaaagatggtctcacatgtcctctacaaaaagcctgaatactaattccatggcgatctcaaatcctttacaaattttaaattattgtttacatttgtttgacatgatttattatattgttaagatatttgatactctgttcaaaaatgcttcatcttctaaatttttttaagaacaacaatcccacttttcctttgtctgtccacctctgagtttagcacaatgtcttacttatggcatgtttctagatatccagttgattgatttttttaatgtactgataccaagatgttataaactataactttacaattctgttatcttcatcagtttatataaaccaaattcattataaaagaagagtagcaaatatctcaaaggaaataattgcttcactgtgggaggctaatgtgtgtgaaattgatcaggaattaaattttaatttgatacttttataataagagattttttttaaagatattaaagcctagagatgtactgggtaaactatttcaggagtaaaatgaaagcgtgtatacatttgccagaaaatgtattctcaggagcatgacgtgaagtaaagccttgaaattagtcatattccctttgtatttatttttttcacacagaatacaaaatataaatgtgcatgattaaaactaatttagttttattcttttcttcaggcttgggaatgcatttgacacgattaactccagggaaaaacaagagaataaattttttttgtaccttctacttgagatctcagatctctagtcagttctacacgattaaaacagagactgtccctttattgtgggagtctagtctgacttgctttgttaagtgaaatggcatctattgatgatcaaatcatgttgtctctgaagtattttatttgaaaactccaagcaataagattactgtttagaaaaccaaacagaaaaacataaactttagagtaactttatacgagacattacgtgtggacacggagaagtaaatttcacccccaccatacttccatcctgaccccagcacctttatcttgggttcacgtaagaccatacagcatacacatactacacttccagcacactttgttcagctatggttgacagaatagagctaacacattctccacttttaccacgtattctttataatgcaatattctatagggaaatgtgaaatctggatcacatgtagatctattggcaggtacgtttctaatctttttctctccaaaatctactgtatcctatttcatgcaggataatcagtgtcatcggcatacatagcaaatggtttgttcataaaaaagcttgatgagggaaataaacccttgatagtctctataggaattatttccattaggaaactgaaagaaaaagagggtgttctatatgtattgttttactgcccatagcagttttgtaatacacaataagtttattacatagaatagccaataggcatcaatattgaaaaatagagaatgtgagctgtattcctgtacatgcgtgcattctcagcaatgttgtgtggctgatcggtattgtgtgagtgcgtgggtgtgtgcaggagtacatgcatgctttttaaaaaatcctctaatctttgatgaagtaaaaaacgttaaaattcaataattctaattgagtgctataatgtctccatttgccacgtttgaatgatttagaatagaaaagattaaatcagtaagatgatatgacattagacaagtcagaattatagctcatctaaaacttgtattaagtgtttgatttctttcattcctcttctcaaacatttgcatattaactgttaagcaacaaaatacagcaattcctaccatttctaatttccttttgttctcttaataaaaccatgacaaataatgcaggcaagtaaggagaagaaatattcagtgaagaatcctcaaaatcggtggttctcagctaggagtgattttgacccccaggggatatttggcaatacctggagacattgttggttgtcacagctggagagtggggggtaggatgctactggcacacaatgaatagaggccaaaaatcctactgaatatcctgcaaagcacaggacaatacctacccacctgcacctcccaccaaacaaaggtttatttgtcaccaaatgtcaatagcatgcaggttgaccaccctgacctgaaggagctcctctgttgcactctggaagttgagtgccccagagggagaagcctagacctcccacccaccccactccacggacttccattttctcccatactgaataacaagttaacacgtttagacaagctgattcctgtagtcccttttaggtttgtttagagcttttctcctgttttatcattttgctctatgttgttatggtttcctgttttcctttcccaacatacatatttagaaaaattccagactcctttctttgatttcacttttgctttctttgtggaaattttgtatttcaaagcaatgaagagacgttgtcaattcctcttgggtatggtcagaataaagtataagataagagagttctcccggtacacactttatgtactattctaaggcatattttgttatttgttttctacagatgtcaagctctatttttctaaatatttgactctctagtacactgcatcactatgacttgttcctaccatttttatcattagtagatgcaaacataaattatgcaactttgtgtgagcttgacatgaggcagcagataattatcgcactggtcaacataacagattgccaatattaggttcaggtgttatgaaaatttaattatattacagcatgagaaaaaaattgagcggggaaaggagccttaactagcctgtgttagcctgcaaagtgtgttctaggggctcattctgcactttcttgttcttccgtctctctcctctgctcaccttctcagtctgccatgccctgctctgaagaggcacccatcatttgccccagcaagccacctagcctgtggagcagagtgacaaacagctccactttgcttagctctgggaggaggccatggtcctgacccaggggtccgtggggaccacaggctatgacctggacagtccctacaactataaaatgccaccaatggaggaagctcttgtgaaaacagacattcagatagctcttctgggtgttataaacgagtaactccttgttctggcttggatgcaaaacagattataaatgtatggctagtatcatacttgaagattatagaggaaatgttgctgttctactgtttaatttaggcaaggaaagtttgaagtaaaaaagaaaaagtgatccagttgcacagctcatttgtgaacagattttttatctaaatatagaagaagtttaaattttgaataacactgaagtgggttcaggaggtttggctttcatcggaaacaattaaaatgtatgccaagaatagaagatgagaaatcgtacctttttcttaaaaataaagagtttttgcttaaagtgctttagtgttttgcaattctgtcaacttattagctttactttctaaaaaataaattttcttatgatcaaggaaagagtacttctgctgggatcacatagaagcttaatttcttgttttcccacaattgatgattgtatgtgtattagtccattttcacactgctgtgaagaaatatcagagactgggtaattcataaagaaaagaggtttaattgactcacagttctacatgactggggaggcctcgggaaacttacaatcatggcagaagcgaaggggaagcaaacttggaacttttcacatggcagcagaagaaagagagtgagtagcgaaggggaaagacccccttataaaaccatcatatctcatgagaattcactcactatcaccagaacagcatgagggaaactgccccatgatccaataacctcccaccaggtctctccctagacacttgggaattatagggattacaattcaagatgagatttgggtggagatacaaccaaaccatatcagtatataaatctgctttgtggtgacctaatgcaaacagtttctttttaaaatcaaatgtacatcaactacttacacaaaaaacctctattatttaattcaataaatgattccttttcagcaaaaaaaacaaaaacaaagtgtgtcccttagagctctaagtgggagagagctgaaggcatgatagagcaaggagagtgagcactgaacacctttgtccttccacggctcagcatcctctgcgtggactgtggtcaggatgattttgcatcttctttcagtagtcagcttagaagttcctcctcctcatcatgtgttcctcctttctattaccagctcccaagtgggcctcttgttttgctactgataacacctgacatgctactgcctttctatagtagccgaacagaggagaacaatctttcttcctctacctttactaacttgctctttgatcgctacaaaaaaaagtacccagtatcctgtgagagtaataaatgagatgaaaaaattatataatgagagaaaaaaagtaacagtcctccatgactatcatctcatctctgtgattttattcatacgtgaatattgcaaacacacacacaccccacagagtctttcattttgggtacataatatattaagcactgagggtataaacagagtgccctcactgtatagataaatacataaaacattatagattagaaaaaagctataaagaaatcatgcaacattatatggtaaaaagtggtgggggccgggcgcggtggctcacgcctgtaatcccagcactttgggaggccgaggcgggcggatcatgaggtcaggagatcgagaccatcccggctaaaacggtgaaaccccgtctctactaaaaatacaaaaaaatagccgggcgtagtggcgggcgcctgtagtcccagctacttgggaggctgaggcaggagaatggcgtgaacccgggaggcggagcttgcagtgagccgagatcccgccactgcactccagcctgggcgacagagcgagactccgtctcaaaaaaaaaaaaaaaaaaagtggtgggtattcaatttagactcagacagaaaagataagaaaaagtcacgcttggataggaaaaacctaaaatacagaagtcctatgacttgtaaatgtgtccagaattggttccttccagtgggtttttggtctcgctgacttcgagaatgaagctgcggaccctcacagtgattgttacagttcttaaagatggcgtgtccagagtttgttccttctgatgttcagatgtgtccgaagtttcttccttcctgtgggttcgtggtctcactgacttcaggagtgaagccacagaccttcacagtgagtgttacagctgttaaaggtggcacatctggagttgtttattcctcctggagggttcatggtctcactgacttcgggagtgaagccgcaaacctttgcagtgagtgttacagctcttaaagctggtgcatccagagttgtttgttcctccaggtgggttcatggtctcactgacttcaggaatgaagccgcagacccttgtggtgggtgttacagctcataaaggtagcacagacacaaagagtgagcagcagcaagatttattgtgaagagcgaaagaacacatcttccacagcatggaaggggacgagcaagttgccgctgctggctggggtggctgctggctggggtggctagctcttattccgttatttgaccccgcacacatcctgctgattagtccattttacagagagctgattggtccattttatagagtgctgattggcccattttatggagtgctgattggtgcatttacaagcctttagctagacacagagtgctgattggtgcatttttacagagttctgattgatgcatttacaatcctttagctagacacagagtgctgattggtgtgtttttacagagcgctgattggtgtgtttacaatcctctagctagacacagaatgctgactggtgcatttacaatcttctagctagacagaaaagttccccaagtccccactcgacccaggaagtccagctggcttcacctctcataaacatatcactattcaatgaatacaaaaaagggcaaaaagaaagaaattagtttggagaggtaggtagaggccagattatggaaggtataataaactatggtaagaaattagaatgcaagcccactggaggatttcttttaagggaattgaatgatatgatttttaaaagatagctctatctactatgtggatagtggatagatagatggatggatagataggtagatagatctctatctactgtgtggatagtggataggtacatggatggatggatagatagatacatagatagaacagaaggttatacagattatggagtgggaggtgagaacagggaaaatgagataaggtggaaagcattgcataatccaggagtaagtaatcgtagttttatctatgatgatagccatgtatatgaagagaagttggaggatgtgagaaatagttaaaagatataactatcacaacttggcaataggtctatgcagagtgtgaaagaaaggtaggaatcaagactgaattgtaggttcctcactttatttataggtaacagtccctttagctgatatggaaaagaatgcaaagagtttggagagaatccagtcctgttgtggacgtgtcacgttttagatgtctgctacctatttaggaggacaaggcaagttgtcagttagggatgtgagtctggagctcagagaagagtcaaggcttatgttatcagcatgaggatggcattggtattggaagccatagattatttactaagtaagaacagataaacagagaagaggaaagaattccaagccaagcctccaggagcttcatctttcaaaatttggtaagaggaggaaaagccagcaaaaagacagagaatgggcaatcagataagaagaactcaaagagtactgaaaggaacaggagcacgtcttaagaacagtattgtaattttgttaaaagaaaaaatgtagagtagagtatagttcagaagtacaaagaagataatagaaaaaaaagtaataaacctaagcaggcaactacataataggaaattcacaacttagatcttgactaagtgcaaggcagaattgtaagtagtctaagaattattttccaacatctactgcttactaattttatggaaggcttagacaggaaagatactaatttcactagatagagaaaacctaggctaatgctctttgaaaactgaaaaatattgttatatacgtatgaattatgaatgttgatttattgtctactccttgttcaaccccttcctccccactccttatgagaaatctgctcaaaatggtgaaagtacaaaaaacagaacaagacgacaacagagtaggtaagtaatcacactgtataataaagaaaataaactggaactacttggaatgactattgaggggagatggaaggatcagacaaaaccccaaaagaaacccaaaggactataaagaaatagaatatcagccaagggatgtttttaatgaaaaccaagaaacagaaagctcagaactaacatcggctaaggggcagtctgtggcaactaagaggtgcttgatgtattttaattcacaaaattgtcccaacacattgtgaaatgcatatgatcaaccttttgtaaagagaaggccaaagcttaaaaggtcacacaaattctcatagttttatctgtgatgatagccatggatatgtgagagtatccaagttttacagaggccgagttggtacttgaaatgaatttggctttatttttaaactcctatactttctagtaccctaggctagtgaaaaacaatgaagtggcaaatgttccaaagccagggaaaatgttaagtaaacccaacgctaagagggaactggtgtaacgggaatgataaacatgagtataattactcttttgtaatgttaggctgtgaaaaaagtgagaaataggccgacaaaatgatagtaaagtcacatatatctagcatgcaaactattgaataaaacaaatagccaaatataactaaatataaactataatttttttcagctaatccctagaaataacttaaagatgacaatgcaaatattcacatcttgtttgggcaattcaggcaaaagtctaatttaatggccttaagtttagtgtttccattcttcactttcacctgtgtaaacataattgttttgtttctttgccaataattttatggaaagctttttctaaagggtaaaaacaaaactaaaaaaaaaatcatgtacacataaaacataatttttatttaacatgtatttggcagtctgttttgtttgcaaatccaaaaaaggatagttccttttagggatttttttaatgtgttactccaacatgttttcactgctcctgagcagttacaaacacagcacagagctgggaagagcagctgggtctatctttggctttcatgcactaatgtggaaatggaactgtctttgggaagccttccttgttaattgctaagattggatgtacttttgcatccaaattcattttccctgatctagttatggaaaaaaatgtgctatcttgtactttaccaatggaaaatggtggaaagcatcatgtcttctgcccccaaatgtgtattttgaatttgataattacagcaatgctgacatagccaatacccagcctaagcagtttatagcaaagacaatgactcatgtacataggggattaaatctgcttctggaaactacataattatctagtcgtattcaaaaatgttatagtcagaaaagcacctaatgattcattggttctgttctctgccttctgcttgcttaaataactaaaatatattgagtaataaattaggagcagtaggttgtggtggttaattacatagactctagaacctgaatgcctgggttcaaatctaccacatacttaaatgcctatgaattatacttaatctgtgtgtgccacaggcttttcctttgtaaaatggtataatggggataaaaatagtatctgaattcctaggctagctataagaattaagtgtgaaatgattaggagggtaagtggctcttacaagtattagacttcttgttgttattatgttattggtactgatcttggtagtacgaaaacaaaaaggacaataatcaatacctcaagtaatgtgtttacagtatagttgaggagataactgcataaaggaacatttagcttatcatatgtgtttaaaaacattattagatttgatggtaaaataaccagtttagaatgccttcttattagacaaatatatactgtaaacattgtgtttaaattatgcttaaagtcataaaaaattagaattaaaagaaatcttacagatcagagtattcactgtattatttaaaatggggaaattgaggctcagatgttcagagaacagcccaggattacacggctatgcactgacatgacccaaagcatagtaagtctgatgttcattcctgagctttttccattggttcatgctggctttacaaactgagaacaaggaggtcagtgtggatcagagtagagctctggagtacttttacaattcagctgggtgagggaggaaaggcatttaggaagaaaatcataaagataggtatgctaccgtctcctctgttaaaaaaaaaattaggacatcatttgagggaagcagagacttttcatggagaatgagtggttacataagtttctacactcatgtaacaaatatttactaaacattttctctatagtaagcctactgtgttctgggcatataatataaattggggaacaaaaagctttctgaactatagagagcttaaactgttgtagaagtagcaaacatagcttataattgttatatataaataaagtatatagaaatgatatagaatgttagaagatgacaagtgaaaataccgtgaaaaagaaaggaggagaataagagggatttggagtgtaggtggagagggccctcaacagtgcaaaacacatcagcataaaccttataacaaaggtgataaacccatttcaaacagatgagggagttagttaagtagatatctgggggaaaaacattccaggcagagagaaaagccaaagctaaggcccaaggataggagcctgacttaagtgtttgaagtacagtaaagagtaaatgtttcctgaacaaaagtgaatgacgagagagtagtaacagaagaaacataatgcagtgaacagcgcatgtaaggctgagcacacaaaagtccaccttgaaaacgctgactttcactcttcatgaaactggaagcaactaaagttttgagcatagaagtgacataatctgtttcacattgtaaaaggtcattctgactctgtgctaaaaggtagattttcaaatccagtaatagaaacagagagttgctaaatccatttgagagctgattgtgtggtagtagaagaagagttgaagtgctgagaagtggttggatttggagtataagttgaaggcaatttcctgatggactggatatactgtctaggagctgtcaaggattgctctttcaagaaagtcaaggattgctcttccaagaaagtgcagtgtgaggaggtaaagaaattacatcaaggagaagatctgatactattaagatgcccgccctccccccacaaaaaaaaagaagaataattacccactagatgtaataacattcataatggcattgataagataaaacagtttctatgcattggtaaaggtgaaacctggataaagtggttttaattgaaaacgagaataagcaagatcagagtaattagagacagagtacaaccatctcatgtgagacgttgggcataaaagaaatgagtagcaggatgggaaatttaggatgattatttttcagttaaagagagtgtatgtttgacaatggaatgatccaataggttatacaaaattatggagtgcttttaatcttttctgaattgagtactgtttaaaggaagtatggatttttacctcaaatttaaaaacattttaaacttacttgtttatcataaacaattgtagacactgatagataatacttgctgacttttaaatcatcttccattttatatattaattttgtgcactctagtctctaaaaaatgacagtctgtcctatttctcaggaaaggcatggcagctgtcattaccacttctcacaaattgaaatgaaatgcacatagcacaccaaaatggagagttctgttttaaactgccaccccctaaaagatactgaactgaaatcagcaacttctaaaactatccttgtctccaagaaggtttcaaactactaatcattgaatgtttaaaatacttgaagtacaggtaaatatttctctgatatagtttctgatagaaaaaaaaaagaaacaaaaacatatagttagattatgtcttcgattcattatatattgttgtaattaataaggggcaagtcaggaaagtggaaatcacccagttatttcaacagagataatttaatagagagaaatggctaaaaagacatcggcagactgaaaaggctcaagaggaacactggagcaccacagctgtgaaggtctgaatgtttctccccaccactcccgctccctgccaaaagtcatgttgaaatcctaaccgcggaggtgagagtatttggagataagactttgcaaggtgattaggtatggaggacaaaaccctcatgagtgatgttagtgcccttataaaagagagctcagagagatcccttgagccttctgccatgtgaggacacagtgagaagacaggcatcaacgaggaagtggtccctcaccagacactgaacctgccagtgccttgatctggacttctcaaccttcctaactgtgagaaataagtatctgttgtttataagccacccactctatgctatcttgttatagtagcccaaacaaaccaagacagcaggtagcatagttactgaaggaacaaaggggaagagtttgaactattagaacatagacatttggaggaggccccctagagaaccggtacccagacttctgcatagctgatatgaatgttggcagggatgtaattaacagagtgcactatttacaattaaagatttaatgcccaatataaatggaagacgagccattggtaaagaatattcatagagacaatattgtacacaattaagcataatatatgacatgtattgtattttaccatgaataacatgttaatgcttctattggtgtattctacaatttgtatgggtgatagcacatagtatgtactatgtaaaactaagcctatgtagtagtagtatatatattagtggggaaaggtgcccctgagaagttgatgttgcccagcttgtgctaataccctaagaaattggaagagggaccctgaggagcttagatcagacctctgagtacaggtgcctgccatgtgtgctaatatatctcagagtgtgggaaaaatctggaaatggtaaccaaatgctactgataccatttagtaggtgcatggattaaaggaccatttttgtggcaacactggaaagaataggaaatgcaacaggaacaagtccctactttttcctcacgccttacagtcttcctccagtacttgtatcatagagtgtaatgcagagccagctggtaaaggagaaaggtagatttcggagcctcatacccagcatcacaaagcaaaatataagagaagtgatgaactgagagacaatggtttgttattcaactaaaattgtcatatatgtgtttggtccattgataggttaaaactctgttgaattgccacttttggtattacacaaattgatgacccaaaaaagattttaggatcatttgtgtgaattcagcacctaccgtatatgtgggaaatgtactgaataaacacagaaagatatgctttgttctcattctgacatttaaataaacctcacaaaggctttcctttgtttgccagagaaaaatcaatgcaaaattgtcaaatatattacaatggtctttgcccttctcttaggaattctcacctgacttctcttgcttttgctgcattgcataaaccctgcatatgcacactgtgccttaaaccattcaatgtgctgtcattgatgtcatctcatctgagtcttaaaagaattttgagaggcaatgagaaaaggtacagctcttctaagagggcaaacaaggatatgtcaaggactgtcaaggatatggtagagaagattttttatttgggacagatgacctttacagttcttccccaacattgagctttaataactggactgaccatgggtatgtcctcatcatattctgtaccaaaaatgaaagtaattatggcatcttcctagaggagattgttacttttaccttcacactagtatggttgcaagcatatgtcacctttgatatcacacaactctggtaccctatatagagaatcacaagaaaagaaaatacttgtgcttgtttacccccatatccacatttctgcttcattaaaaatccagaaaggtcagaaagcctaaactcacctggcttcactctccatttgtctccaggcatggctttttgatgccctgacagtagcccaagaaaacagaatattttcaagaaactcagcaggagtgaccttcagttgttgcctcattggcatatatttcttggtaaccagggaaagctctccatgacaccctccaggtccccaaaatatactgaatgcatgatgccagaaacattcacattagagcactatttctttctatggtgataatgggggttttgacctctgttgacatgcaaatatttctgaaagaagttccacatcttcttccctgagatccaattttgatgtgaatattgtataagaagtgatcaggaggaagaggctacttaaaagagaggcaaataagatagcctgaatggaaacaaatataactgtttttgcaaaggccagtgcctgcccataaatgtactttttcagaacaattgtcaagtttcttttcatccaccagggttgaggtgcttcctcaaagacactcttgtgtagtcaaggctcacctttatttcccttattgaactctgctcgtttcctttaacatctattttaatactgtgcaatggtattatatttttctgtgtttcctttttaactctagcactaatataaactttttgaaaattaggcttccacatccctcatttgtcattgttttgcaagatcctagcccagtgcctggcacagatatatgtgcttaatgcacttggctagatggatgaacaaatgaatgaataaatggtatgaataagtttcatatgctttttagtccacccagattccaatgtaccatatttatcagaaatgatataataaattattaaactttaattcaaaggtttatattcttattgatgtttttattatcagtaattcaattagtaggacatagtgggatattttattgatttttaagggatttaataatttcacattaaatcagcaataacaaaaacaatttatatgcttttcatgtccttaagaagtaataaaaacactcagctaaatgacaatttaataaggtgaagtttcatttgcaaatctctcgtttctttgagttcactctgacattgtcttctgtttccctgtttccccagtgacttcttatctttagtttaaaatggaaaagtgattaaacatgtcaaaacaaataactctacattttaggttttcaagtaaattaaaatttcatggacctcttaaaaacagacatatggaaatatctaataataactacatgaactgctaatggagtaagtttccaccaagcttaaaaaacacctttaatgtttttataaagccattttgaatgatagctgaaaaaaattaagttcaactcattcctaataatgctatttatgataatagttcttcagtgactttattctgcaccatggattacatgcacaaaaggaacacatatcgactgtatttgtgaaaaggaactacttttttcacactgctaagttaaatcccatcttattcagctgacctgcgattcagcacaattaacctgttcattagttgcaagtaaaatgggacatcaagtgatggtttaatgcaagcattaccacatctgaaaaataaatgtaggtgtttgtgtctcagagtgatttttcttcaatatcaaaaagcactggaaacgcctaaatctaaagcaaaacctgaatgatggagttttctgtctctatcattttcccttcctatatgtgccagaatgaattacgttcttgttgagcaactactagaggccatgcaccaagcaatacacttagaagataaggagaggaataaaacaggctccctgagcagaaagaatttattctctaaaggagaaaacagatctcaaacaaaaaattacaatacagtgtaataaaatccataaaactgatgtataaaagttgttttatgtataaaggaaagagtaacttgcttccctgaggattcagtggttatttgacagaggaagtaacatttgatctgagacataagggaaaggtcagggttcttgatttgggcaagaggatgagtcagtctaaacaggcaaagggaacagcattgacaaggtatgaaactgcacaacatcttcgggcaattttagaggtttctgaagcatgtgggccataaggaaaaagagcagaaagggcttacatgaattcaaattgggaagtcatgtgtatcttttaggggattcagattttattctatcgagatctattagaagtatataggtaagagaatcatatgatcgaatttgcatttcagaaatacgattattctggcattcttaacttttatgtttttaatttttaaaagataatatgcattattaacatatctacacctgagattagagttgaactaaaataaaattaggtgaatcatgtatttggaaagtcagatatacctatttatctttgatgttcagatattgtttgatttggatgcaatcttttaagaaataactttttaaaacatataaccaactctattcatttttaaacacagattaaatgcatcagtcttcatattaatattttaaatatgcggaacaaggtaaagtagtctcatctcgttttagtcaaccatatgttctgaaggccagaatcactgcatggtctacaaataatttttccatacttatgaattctcttatgtaatatgacttacccaggtgtacaaataaattccaattaatgatgtatctaatagactgtcatcattttgagtcatctaaccctatggtcacgcctaccaactcacaatatgtgaggagggcatatcactgcctccgaaactgataaatcttcaaataaagtgcagaaaccttaattaagaaattggtatatctattacttctctatgaatcatacttttttatatgatatgaatcaaagtttttttttggtacaaaagttgcaaaacagaagtgacataaattatccaatggttttggttacctggttgagaaaatataattggtaagaacctagaaacataaaaggtttgcttggataagtttaatattatttttaactatgcagccactgaaccactgtgactgacaaattggtttgtcaatatcacaagcaattgcaaagcgagatagctgttttcttaaatgctatcataaaactaggaagtgtttccaggataatttcagttgatgtaaaaataaatattcaatatacagaaccatacgtgatgttagtggatgcttatcaattattatatccaggccatttatttcatttatgttcatattctcaggaaccaaatttgtttatcaaattatggaaatatggaataaaatgccccagttaacctctggctcagaggataataatgttgctgggagtttataattgcagaagttttatccagattacaaaccagattgctaggtgcctctgtcactgtcaagattttattttttattattataggtttattttaattacaaccccctccttttattaattaagcatatgtttattaaacactagcagctttattgcatacaatatgcccattataggaaatttagatatttcaaaccctaatagagttcagcatttaataaacaagatataaaattgtaatatgatgtgttaagtactgtctgcatatgtatgcatttagaggcaactaaatcttaaaggggagattgtttacttatttttattgttgttgaggatgtaatatttaagctaaaatatgcagaggcataaaggaattaaagatgaaaagtaatgccatcaatagacacagaatgctcaaatgcacagagataatttcatactcagaagcctaagagaagaaagaagcaatgaatctgctgagtaactagagaggctgatcctaaagactttttcttgcttactaaataaatttggattatttcctaaaagtactgggaaactattgaaatattttggaaataacttagatttttagctgcgacattagacatggccagaaagggacattcaagagacagtgaacaggtaagtgtgaaagaacgtagtgaccagttgcaaggggtgggtaagcaagtaaagaggagataatgaggtctccctagtttaagacttgggtaacttggtaagtgatgttgatgataatattagagatacaaagtatagaaaaagaaatctctatggggatgatgaattctgcttaagacatgcaatatatgaagtaccagttgcatagcgcaactcagatttgctataaccataatttggagaatgtgggataaggataagtgagcctcctcctgtgaggctgttttatatcctgggtactgttgttcagctggcctatcttttgagcacatatgtgtatattaacatatagatatgtttatgtgtaattaaggaatatgtatctgtttataactatatacttggagccaagtatactggctggcactcagcaggaactcaataccaatatgctgaatgtatgtggggatccacccagtggttttccctaagaaggattttgctgactgtcttggtacaagttctcttgctttgattccaacttaaaagaaaagagctgactcatcattcagtattctctctctcatagggtacgctggcatcttcactgaagtatctgctaatctctttactagaacctctgttcacagtttgaagaggttaattttgcttcactcaaaattgaaatattttcctgtgaatctatccattctagcatgtcctttcttacctgtgatggtatagattttatcccaggagaaccttacaagtttatgtgatgagcattcattccaggaactctaatgctgtttccatttttatgaccaatatgctttgacctcctttctgttccagaacaaaaggagagcacagaaagggtggatattttatcataatacttcttcaaggccttgaaattgcatattgcctcctatatgctaccaaggcctatgctatgaatggaatctttactcttaaacagatcaacaacaaaaaccatacccagtgtcttgtacccttaaggcaaaaggcatcctgggcaatccctcaactcactttttgcacactcacaaatattctatctctcagtactaaagatttatcaatattcaactctgggacatgtgggaacacccatttatagatggtctactaaatggtccaccagtattcttatttagcttagtgtttatgtgactccatatatcactgcttaaaatttaatctttaggttatctgcagagcacatttagtaaaagaaaaatagcaatttgtcttttaactattattatgaataatgttgtacagtacaaaattaaaaaaagactgttttcataagctaatagttgttcttccctctgatctgttaataattagtcaatccatcattaatggcaaaggcaattcagcattcctccatgtgttgcacatgggtgtagacaggtattaacttagaaattgaaaatgtcttctgtggatctaattatgctgaaaatatttgtttataatagtccttttacacagtatttactgcccactttattttctttgttcccacccagaaatcaaaccacagaatttaggttggatagcatgttaggtttgggagctgttgtagtagttaaccagcaccctcaaagcattactcagtttcagcacatctagaagcataagcatcggtaattttggctaatgtatgtcagctgaactaagtaagcataaaaacatgtctgacatttaggaaaagaagagccacccactctcttacttaagtatatatattaataatgtttctcagcaatcatgttacacatgcacagtgacttctagcaatggagctttgcttctcgctcttgggttttcacgtcggctggggttgtgttcatgtctgctccatgtgcacttcatcctggaccagcagcttctccaggagtgctcttctcgtggcgatgataaacatgcagtgccctaggccaaatctcacaagtgtgagcctctgtcatgaaaactaggaaagggtgaaggaaagccagggaaatgaaattcaggctgtagaagcatcacatcccaggctgttatatctgcaagaacacagaaagttaaggagagtctcagtgtagttgatggtggcaagaaccagaagacagaggacaatgagtctcatgtcagaaaactcagaaaggaatggatggctaggctgtgcataaaagaagaacaacaacaatatcttaactgttatctccttaaaaggtctgaaaaattggaaaccagtctattaaacagaaataaataataacacagcaccaattactagtaacttaaaagatgtggcatatctttttagtatgctatttttaattgtttcagtgaatttaaaatatttataactactttaatgagttttattattcttttcttcaagttacttacccaatttctccttctaaatggttccttaatctcctatctcctatggtttgggaacaactacaaccttaggaaatcctctttattattctgacataaaattctttaggtcttattttgccatgcaatttttatatggctatcttattattccaattaaaatttaactttaagtcaggcaatgtgtgacatcctctatggtatctagaagagagctcacaagttaggtgtgaagaaatttctataaataagtatgtaccatatcaatgaaattcatgagttctgggatttgtaaattggacatctcaaatggaagaacagagtagatggctcacacccccttttcccattttctacattttctgtttttgaacaaaatcatcttagtttttcccagcatcagacattcacttgtataagattgaatttacaaaaaaatgagattcattcgaaaactcaggataaagcaaaattcaaggagaaaatgaaaatctgttctaccataaatccctccacaactagagagatacatattgacttttttggtagcagagacttacgtgacaggtgtttatgcctgaactgttccacagataaatggaagactttattctcaagtgatcctggcatactcatgtggaaaaagcaaaaacataattgaaagaacgttatttcattctcctattttggtaagttaagaaacaaagggaactgtttgtaactatttcttatattttgaaagccaggtgtgacagttgacattatttactaggactgagtttataaagcagacccaatagaggctgcttattcattgtgagacatcatgcctgcagctgcctccaggtaaatggtgacttgtcttacaatgcataaaccaagtagttaggctctgcgccaagcaggacttgaaaagacttatagaaagcacatggttcccattcagatgtgcttttattttttaaaaagtactaaaataattattgcatttattctttttatgttttatttttaattgacacataacaattgtacatatttatggagtacactgtgaaccataagagatagttaacataaggaggaatacatttaaataaatgcaatatttaggtctcatggatttttagaattgtaagcgaaatttaaggttgcttaggtaacactcttcattttaaatattagactgtggaagtcaagagggattaagaggttagtttttctcagtttaaactttattcccttccccttgttgcagattctaaatatgcgcttttcaaattgaggggcgaccacatcaactggctacaattgtcccctctgtgatttttgttgtgttttaatgctccaggctggatctcttctgctactttaaagatttcaaatgagacccaatgcttgagaagaaaatttgatgttttagaaatcattttcatttcttttgatgggaaaataatttctttatacacttaatttcattacctgaaacacttgtcaaagaatgactgaatcttataagacaattacttgacttagttgtttcaaggaaatctattgagttggaatatcaatctacatattatttgaaagcttgaacaagagatcctgatatagatccctatttaaaaagtactggttaagtccaacatccttttatcaaaacagtgggatttaaaatccaaagtattttttgatttttttttctttatggccattcttgcaggagtaagggggtattgcattgtggttttgatttgtacttccctgatcattagtgacattgagcattttttcacatatttgttggccatttgtatattttcttttgagaattgtctcttcatgtccttattctactttttgatgggattgttggtttttttttctggctaatttgtttgacttccttgtaaagtctggatattagtcctttgtcagatgtatagattgtgaagattttctcccagtctgtgggttgtctgtttactctgctgactgttccctttgctgtgcagataagtcccatctatttatctttgtttctgttgcatttgcttttgggttcttggccatgaaatctgtgcctaagccaatgtctggaagggtttttctgatgttatcttatagaatttttatagttgcaggttttagatttaagtccttgatccatcttggatcgatttttgtataaggttcagtttcattcttctgtatgtggcttgccagttatccagcaccatttgttgaatagggtgtcctttcccaacttgatgtttttgtttgctttgttgaagatcagttggctttaagcatttgggtttatttctgagttctctgttttgttccactggtctgcatgcctattttataccagtaccatgctgtttaaaaaaatccaaaaataatagatgttgacatggatgtggtgaaaagggaacgcttctacactgctggtgggaatgtaaactagtacaaccactatggaaaacagtgtggagattctttaaagaactaaaagtagaactaccctttgatccagcagtcctactactgggtatctacccagaggaaaagaagtcattacatgaaaaagatacttggacacaaaagtttatagcaacaaaattcacagttgcaaaaatatggaaccagcccaaatgaccatcaatcaatgagtgtgtaaagaaattatgagatagatagatagatagataggtatggaatatacactcaaccatgaaaaggaattaattaatggcactcacagctatctgaatggaactggagactattattctaagtgaagtatacaaggaatggaaaaccaaacatcatatgttctcactcataagttggagctaagctatgaggatacaaaggcataagaatgatacaatggactttggggactccggaggaaggatgggaggcgggtgagggatcaaagactacaaattgagttcagtgtataccgctcgggtgatgggtgcaccaaaatctcacaaatcaccacgaaagaacttactcatgtaccaaataccagctgttccccaaaaacctgtggaaataaaaaatgttaagtttcttgtgcgtccgtgtgaagagaccaccaaacaggctttgtgtgagcaataaagctgtttatttcacctgggtgcaggcgggctgagtctgaaaagagagttagtgaagggagataggggtggggccattttataggatttgggtaggtaaaggaaaattacagtcaaaggggggtttctctggtgggcagagtgggggtcacaaggtactcagtaggggagcttttgagccaggatgagccagaagtaggaatttcacaagacaatgtcatcaattaagacaggaacggccatctggatgtgtacatgcaggtcacaggggatatgatggcttagcttgggctcagaggcctgacattaagataataaaataaaacaaaatctgaaagtaaaattgtttgcccagtttttaaacaaacccagtagtagttttgttatatctagaattaccccatcactgtaaggctgctttgtttttttaatctcttttcctctgaacaaccctgacaaaaatcggatggaaactgacattttcctttctcaaccatgctcatccatgcagctttgacatctacatgaatggttaatatcattgattcttgttattcctgtatctattatgctctcacatgcaaggatcttcatgttctttgccaggattcccagaaagatgctccctttaatattaactggtcaattttgataatggagttgatttttctttaacgtttataatcactgtaaacttcttgacaagatggtgctattataacactgactgtttctgccgaaagaagaatgttcagtactaagacatttctgccaaacgttactacaactttgaaaagcccttcctctggcttgctaggaagctcattggagaccctaacttggagtttgttgccatgcctgcccctgccccactggaggttgccatggacccagctttgacagagcattataagcatgacttagaggttcttcagacaactgctctcccagatgacgatgatgacctgtgagaatgaagctggagcccagcatcagaagtctagttttatatgcagctgtcctgtgatatcagcggagcagggtatgggccaccttattattatctagctaggtggggcatgtggttcatctgtgggatgctgaaggagatgagtgggcttcggagtgaatgtggcagtttgaaaaataccttcattgtttggacctgcatattgagctgttttggaatgcagttgattccttcttgagtttcaaatgtaagactgctgcaatcacattagtgaattcaggggtgagatcttgttactgccatttctactccttttcatttagaatcagaataaagttgtatttcaaatatctttttaaaaatatatttacattatatgtgtatatatacatatatgtatatagtatatgtataaatttacatgcatatatatacatatatgtatatgtgtgtttacatatgtatatataaaatgtatataaacatatatatatttatacatatatatgacacatatatgtataaatatatctatgacattagacataatgtatttctatatctaatgtcatgcatatatttatacatataatagatatataaatacatatatattaatgtctacatttgacattacatatgcatgtcacttgaaaatttgtgtatataaaatatatgtataaaactcaattcaaagatatgtttccagtgatgggtcttgtcaatgtagacatttaaaatgatatttgggaattactgatgttattttaagagcttggtatgtcagagattttcaaatggaagcagttgctatagtaaatatggattttctcctaattaattcagacattaaaaagttactaattgcctacttttttcctaaattgcttctggaatataaatatttataatcttcataatattcccatctgataaaggttaggtttgatttcactttctttctaaaacatctgagcattttcaggctctaactccaaaagaacaaaactcgtgaagatttaaaatattttaatagattatattggaattccatttccattatattgaagttactttttccattgctatcatattaggaaaattaaatttatacatgttctatacttaaagttaagttttagaagtatcttttccctaattgttattgagaaattaattttaatacacttttcatctttccaacagactactgcaaacaaataataagctagaagtttagtttattccctttcctaaagctcttctataaatattgactccagcaatggaaaaagcaaaagtatagtcagcattctgtatcatatatgacatatagaatatagaataggctataccatcaataagataaatcagtgcctttataagaccaaatgagtatatcaatctcagattaaacaatgcaaagcacttcgttcaagtggcattttcaccctttcaaataactccactaaatatataatactcatgaacactaataaaataaaaatatatgtgttactcttctgtatatatctgtaaattgggctccaaacactacattttccatttatctatacgactctaatgaaagcatcttggcttaagaaaactaatagatctgaggtggtaaagtctttattattgaatcacagaactttgcctaaatgcgaagttctagcttcaagttaaaaaaatttataaatatttcaacatttaatttagatacagcaggtacaagcacaggtttgttaaatggaaatattgcatgatgctgaggattgcagtatggatcctgtcacctaggtagtgagcattgtacccaataggtagtttttcaatcaacgccctccctctttcccctctctagtactctgcagtgtctactgttcccatgtttatatgttcatgtgtgtccaatgtttagctcttacttataagtgagaacacgcggtatttggttttcttttcctgtgttaattttcttaggataatggcctccagctccatccatatttctgtaaaggacacaatttcattaaggaaggagggaaggaaggaaggaaggaaagaaggaagggagggagggagggagggaaatctagaggaatggataaattcttggaagcccacaatctgccaagactgaaccaggaagaaattcaaaccctggatagaccaatatcaacttctaaaactgaatcagtaataaagtttgggtctttcttaaaatttctattttgcctttcagctcttaaatgatattactggattgcttggtttccttgaattgaatttcaacgtttccctggatcttgatgtgctttcttgctctccagattctgaatttcatctgtctgtcattttattaatagttatttaagattgcttaagaaccattgctgaggaggtagtgggctcgtttgggggtaaggaggcactctggcttcttgaatttccagagttcctgtgctgattctttctcatcttggtgggtctctggtcctttaactgtggcagaaattgagtatagtcagttgacttcatttctggacattttcagaaggccacacaagactctgtgcaggggtttttgtttgctgttgaattcttgtccttggcttccaaggcgggtgaatggttttgtggtggtgtagtttggggtgcaatccgtagatggtgctttagagctatgggtggtagatggatactcagcgctggggactgtgtatcctcgcgtgtgcagctgtgctctgaagtgtgagggggagaggggtaaccccctcaccagttccactaataggccttcggaagccactgctgatcaccggcactgtgccgtggctttgtttgtttgtttgtttgtttgatgtttctggctgtgggcttccctggggcaggtgttgggcagggggatagaccacgcccttactgggccagctctgtggaaggaggcattccaggtgccacaccagcctgtgaacctgtgcatctcacccttctgagtgtgggctcctctcctactcaagttccgagcacaggtaccagctcagcactcctgagccataggatccaaccctgcagtgccagaacctgctcacggctccctcctctggactgggttgggttgggttctgggtgtgctggggatctaaggggccgcaggctgccagaacacactccagtggaacacagcacccaggctgggcagcagacgcttcactgtgcatgtgctgctgcggggcagccaggcaggagccctgggaggggctgacaggcaggcggggctgcgggacagatgtgcctcagtgccgtggggaagctcgccctgctttctcccagtccaggagttttctggggccagggcctctcagagggagatggagagccctgagagacgggtgcctatagctgggctctgtcagatctgttccacacacaaatgtccccagctccatgtctgctgaatccccgcctctatcaaatctcccaggagatgcccctgccagctcaaacatccattggggttttggggttccctgcagctaggatcccagaagtctgcatgagcgtgggctgtcccccaggctcttcactcaccccttcctcaggagccatttgaggcccggaatcagctttagcattcaggcacctcccacagggcttccagcctcctcttgcttcagccttagcatctgcgtgttttcttcatccacattcggtattttctctctgaagatctttttaaattacagtggtttagaggtggtagcggcccttcctggctgcctctagttggccatcttaaaactcctctcctgaaaagaaaatgttatggaaacatgaggagaacaaatgcctgcaaggaaatcaaaacagtgctgtgacaccattcagtgtcagctacacaaaagaccaaaaagtgaagctacctgtaatagactagaatctgttggttaaccaaatggtacagaggtcagtttacttactcctaactggtaaattcagtttataggtacagtgtttcagtgggacttaaatcatgtagttggttcagctttgttatgaggatcgtgaaatacctctgtaataatttcatttctgccttctccaaatatacatgtggtatatgtcatgtaaattaccttatatatttaagaaaccaaataagaagtttcgagcttggaataattcatgtgagctaactagtttctgattaaaatagcatcaggaaactgagtcaggcattttttttttcatttgccattccctgtaaattgggtattacatcgtgatcatgaaacttaccagtgaaatatgttctatgaaaaaaacgagaatacctgcaattaaataactcaaaatgccattcatttaaaacacatttattatatgcccagaattttcaagatactatgcaagacactgtcgggaatacagagatgattaacatgatgtttctgccctctctggatatgatcttcactaatactggttcattgtaatttccacttttattacctttcttaatgatgatattctcagtcggtgattttgaagataagcagatttctcgatgactatttaatgcataccaataatagctttatttttgttatgtctgggtaaagaaacaaaggtttatttcttttccttgacatttatagcatcctatgtatctgtgttccatgaaaggttacctaaatcacatttattccaaatgggcaatatttaactttaaaaatgtcaaaggaagggtacaattctctgtagggcaatattgaattggttgactgaatgataattatggaataatgcattatgcattctcttttcatttcaaatattgattaatattattgattctaaaactcatttaatctgttattcagtagaatcattgccatatactcacttaccttttaattttgatgttgataattaattgaatcaaatattttttcagagtcatttgtaacttcatggttataatttctcaattcatgttaatgtaagctttgtaagatatgccattgttcaggtaattatgtataattaggcacaaagagaaaatagttacctacctttaaaaaaaagccatcaagatttttcagttgaaaaattgagctaaaaacagaattagaaagatttcttggagctaaactcaaggatctaaaatgaaggatgagctcaggacattttgtaatttaatattggactcatatgcacgagttccttgcaggagctactcccactcctagtcttgactacaagggcaggtgagataatatctgcattgtttggtatatttaaaccctgcttctttaagtgttatcatttaccacaaaatatcgtaatataactgtcacagaaagacaaatcaagaagaaaggaaagaagaaagaatacatattgattgtcagcattaacacacaggctataatttgatgtaatattcaactctatactttatggcaaccaagatacacaagaaaacacaacatttacatagatcttctcaaaaagaaagaaccatacctgaagaaataaatgtgtcttgatggtattaaagtctgcactttctcacttgagtcctaaaacagggaaatgagcattattcccaacaactataataacatatttaaaaatggatttcttaaatctgatgacaaatgtttagaactaccatttacataagccaagtcctactttttttttttaacaaatcctttctcctgtctcctccagatgccattgccattttaaatttcctgactgacaatctcccaacttcccaaaaagtgtttatgaagtacctaagaaacaatttgaaacttataatgagatccagaactagtactgactttgaatccattgtatggagggaatgttattacctataaagcagatgagattagatttataaaaacaaatggggatcatcaggatgttgctaccagaaagagacccagctggcatagacacctgttagtaaaaggaaaaacattttgtgtatttcgtctactgacccccacttcagaaatgctcgatctgtataaaccgtacaactagacaggcattcacctggtggatgctgatattctgaagtagccagagtgatttctccaccctaaataaaactttcttccgaatttcattcagagatgacaaaaatgaggaagtgaagtgggatggggacatcacaagtgggacattgcatcccgggaagcaaggggactctgcacacgttgctgctaactgcagcggcacctgaggtggttctgaccgctgtaaactctgtcacagaattggggagtgagtatacatggagaaaatttgttttgagtacaatttcataaccagaaaatgatacagaatcatgtaaaacaccctataattcaagggcatcaatagcaagcatagggaactgattatgcctaaaacagaggcaggtcctctatattcctccctctgaatcatgtatgtcctcaaaaatgtcccatcagcacaaaaaaaccagcaaaccacagtccatcctgatagcctcctttttcatattaatagcagcattatactgtagtttttctgtctcaaaaactgaattttttaaaactttcattttcttccctatatctgattacttgtcacctccctcccaaactcccttacatatgtaattgtcttttcccatggtcaccatatccaagttctgattaccttttaataaaatgaatgaattagcttcaacaatgcaatttcttatccaggtatccattctttcaatccttcctaattttgacatacctgtagtagtttcaaagcacagatcacatcgtgacactcctgcttatcattttcaatactactccattgcaaatattaagaaagcaaaactgagagccagacaacacccaacagatattgtctctcaatccttacattcccatgaagaaaggatatatgtaataagagagaaaggaaccgtgacttagaaactctataaaatataatccacatagattatacatatgcttatggtgatattactatactgactttacggtgctttctagaatttagactctgggccattttggcaaaataaggagcctgcagactgcttatgcctttgaagagaaaaaagaatgtgaaagatgttatttttgtgatacatcaagagagaatatgataattaatattgtatttttattcatgatggaaataaaaataggcaaacactatatatgctgtaaacctttggagtactcctttgtcgcactgggaacatggtaaaatatataattttttcatagatagatcgcactataagagacaataataatggaaactgtcatagttccctgaaattcaagttgaaatactatttacatcaaccataccgccgactccatcataatgaggaaacatctcagggattattaatggggtaaatttcactatatagagaaaaaagacagataaaaacatgtatatgcccaaacttcatttgaaaggagggcatgtagggaaaggtagattaacagctgaacttcattagccatttacagaaaagttaaatattatatctaggatacatttgtcttaaatcacccaggattaaatcttccaagattaaggatttcatctaatcaatttcacctaattgaaatatgcagcccttctgctctttttttgtaactcctatattccctcctatcctttaaattatttttcatttaaaccattcagcagtttaaaccattctagactactctggcctgaagtacttcatcagaaatctttacactttagcttaaatattcatttaataatgaacaattcatcttctattaaatgctactactcaatttttgtttcaaactatatgtacatttcttgttaggcataattttatatatttattaattggtttcccttccaagacacagaacctgcccttccctcccagtgaaaccactatgaggtgaaaaatagtgttgaagaaggaagagggacacagagaaagaaataacttcacacatctatttaaagatggccctgaggtccacccacagcatcgcagggatgagttcatgagggagtatgcagccacaatacctcttaactccccatgacttccttgagcttccttgtgtgggagtagaaggttgatggaatggttagcctttcctggtatctgtgttcatcatggttctcagcagatccagctgcataaaatgtctctatctgttaggatcaataaaacaagctctctaactgctctataatcagcatcaatttgcgaacctttatcaaacttcccccctcttttcaccaagtattcaggatgacatgatgaacaactggaccaatgattggtcaaacatatcctaatatcaaatactggcagttacctggagtaaagaaggacattttgtgtgtccctactttaaacgagatccttaaagctttttgtatggctggtctgagtatttaacagaagtcccgtactcataaggatggctagacctgaaaggagcctctcacctgcagggtaatgattcggtttaatgaggaccttttggaagttacttggctctaaggccagaaagcctaactgagatcaagacataattgaataggaattgaagatccatttacctcatcagttggaaaataagcatttttcaaaatagagagataattaaatgtggtcccttcagtgctacggattaagttagtattatagttttaatatacatttcaaacagtttccctcttattctgtcataggacattgcaattaatttaatcaacctttaaacagacatttaccaagaatttatgataatttagatattgtgcagatggatgttcaatgactttttcttcttaagtcaaaatatttaaattcttcaaaatagaaaatgtgtaatatgtgctgcatattatatgcctttttcctctttcccagaatgccttttactagttttgtgaaataaacaagatagattatatcttatatacatatgtataatatacttacatacacacgtataatataatatttataatataatagaattatattctgtattttatataatatataatagaattatatattatatataatagaattatatattatatataatagaattataattataatatataattataattatatagaattatatataattataattatatattataatatataatagatatagaataattataatatataattatatattataatatataatagatattatagaataattataatatataattatatattataataattataatatataattttaataatataatatataatagaattataattctaaatataattataattctatatataaaattatagatataattctatatctataattatatataattctatatagaattatataatatataatagaattatattctgtataatacatacacacgtataatataatagaatcatattctgtcatcttttcacttcagtctatctctttctgtgtcattttactcctttacaaagaccatatcttctttaatcctgctgagggaagcaacttaaaaataactttgatatggtttggctctgtgtcttcacccaaatctcaccttgaattgtaataatctccacatgttaaaggtggaaccaggtggagttaattaaatgatgggagcggtttcccccatgctggtttcctgatagtaagttctcacgagagctgatggttttgtaaggggcttcccctctttgattggcactcatttctctctcttgctgccctgtgaagaggtgccttccgccgtgattctaagttttctgaggcctccccagccatgcagaactgtgagtccattaaacctcttttctttataaattacccgttctcaggtattgcttcatagcagcatgagaacatactaatatgtacttctagcttctgtagtcaatgatttctggatacatactcttcttctaacactttaagataatattcctttctcttcatttaaaaatatgtaggcaacttcatattcttctcttcaaaccaaaatataggggaaactgcatagacttggtgtttgttggtaggatggattgctttctgcttgcagtatgtgaagcccattcagggttgagggagatccagtttcagcacatgggtaggctaattcacgtaactcttacttcaatttctaatatccaaaagcaattatgtagcacaaccctaaatgggtaactgaggtgggatttttttgcttctgctcatatccaccatacttataaaaattgaaaataccttacgtctaggctgtatgatcctgatcacccacctgactataatacttacatgcagagaatccactaatttctagcttacccctcaactctatctgtggaaggcagaataatgccccatccgcccccccaccacgaagatatccatgtcctaactccaagaacctgtgaatgtgttgccttacatggcaaaagggactttgcagatatgcttaagattacagaccttgagatggagagattattgggtttatccaggtgggctgagtgtcatcacatgagtccttcaaaacggagactgtttattatctgtggtcagaaaatgataggtcaaaggaaggaggcagaagaaatctgaagtgtgagaaggactcagtctgttactgctggtttgaagacagaaaatggtggccaagagctaaggaacgtggaccccatttagaaggtggaaaaggcaaggaaacagtttcttacctagagcctccagaaaggaatgtagtcctgccaacactgggttttagtccagtctgacttttgctggacctctgacctacaaatgtgcaagataatgaatgtgtgttgttttaagccactaattttgtagtagtataacattctggagtttaagagtctgaatggatacttaaagatagaaagaaatgatacaacatcactctgcccctcttacccaaatactgtctatgccctaggaatggctaccctgattttctcattagtgcagtgtccgggtctctgaaacatggaggagaaaataatgcaagaataaagtgcctttgaccatatttaagctaagagaactgctctgttttatgacaaagtagaggaatttttaatttcttgatgtaggttatgttcgacctttagtttgaaaaaacaaaaaccgttgattaaggcagtagttattatttttaaattttttagtcactgtttgttagcatattccatctgttttggcaagttcattgtggaaagatgactctgttaggattaaggactccagataaagcaggggtctttcattttcatcagaagactgatcagggtgctggagttcaggggctagctgagcactcatcccaactgcagtgctgtggccttgtgattgtcatctaacctttctgagactccatatccttactttttaactaagcatactctgttaagtgccgtcttaagagtcttctagatttctatgcctgtaattccaataaattcattaattctttcaacaattatatagtgaacaattatatatcaaacttggaataacagcaaaaggttcttcaattttaagaaacaaaatattaagactagaagcttagttggatattgtggtatatgcgataaagaaaagtaaagaggatgttatgttcaagattattgaaagtggttagggaagtcctctctgaggagacaatattataatgaaacaagcctacagaattagaagctcccagtcttgcaaatattggaggaagaaaactccagacaaagaggaggctaaacacaaaggttttgaaataagattatctaccagattctaggaacaaatggttgacctgtacacccaggcttggcatgtgagtgagaataatattattataaacttagagtgaaaccagttgacccattttgttatcttttacagataaaattcaccaaaagggtaggtaattagtcttatcaaaatcggttttatttacaaatatgaaggatggaagagtgggcacaggagatgagagcctatattaagtagttggtaactcagtaaacaatggagtctaggccagacaaggagggagagaaatataggaaaactccagtggttttgggaaagaggatagattcaaaacaaaaactttaaagggttacaatgatagttatatgggtactagagtaagtgatcttgaggacaagaggcatttttgagaagaaaatgtttgaaatgaagatgcaagatgtgcccctgccccaggttgtgacaaaagtgaattgagtccataggaacaggtgtcagggatagaggatgcggttgtttgagggagggtatcaggacctgagaagccaaacttgatgagtcattttacgaagggtgacctgttaaagaatacccaggaacaggcctggagtagtcctgaaagagggaggcaggtgccatggactaagggaccaggaaggtgcacacaatctcacaagactccagctgccatcacccatgttcatttccttgaagaaatcatcttattccttaatttttccccaatatatagtttgagactttctgattctctttctataaatacaaagccctagagatttttattatctggtgatccaaccctttttggagtgactaatcaaaaaagcacatgacagtatgcatattttataattttggaaattactcttcctatttacatatactttggagtatatcacaactccaatttagtacattttgttattagataccagaaaatcatgagttcatactacagtccctctgctgccccatttccaacttaaaatagaattaccaacttaaaataggagaaacaagcttaaaatagaagaaacaagccatcacttaagtagatatagaaatatagttgataaaatttaacacctgtaccagataaaaatttagtaaactagaaatagagctttaccttagtaagagcagccattaaaaaaatgcatagtaaatgccattgtatatattaataatttcatttaaaattaaatatgtgacaggaatgcctactgaagttaccttcattcaatttttaactagagatccaagccagcatacttgtacgctgtactgattgaaatgacaatcaaattagtggaataaaaatgggaaaaaagaaaatgaactgtcattatttgctgatcataaaattatttacataggaagctactaaagaatacagagaaaacattataaaatagcaatggatcagcaaaatggttaatataaaattaatatatagtagccaattgcatttctataacaaacacctagaacacaaaattaaaaataaattatagcttaaaatatgtcagtaactattttcaaaatattttgaaaaggaaatggcagggaatatttcacaggtgggaatagtatatgcatgggacaatgagggcacaatttgaagtaagtcactataagccaagaagcttcatgataaagctgactttaggaaggttaacctggaagcaaagtaaaatagtttgagctggggggacagcaggtggcccagagagaccagaagccggagatccgggaaaacacatctccaaagggcacagaggcagagtgaatggactgaacaggagagaattagacctcacacctttcttgaggaaggtggatctcagtgcatattttaaagattagaattcacatagatatattattttactagaaaacattttctcatgtctaaaactttttaaagcaaaattacttaaaatctttggtaagttttaaaagtttagataatgtaaatgtttatatacttttgaaaagtaaactaagtattacctttaatatttgtaaactttcataacctatcactgatatttactaaagaagagagtttaacaacactgagaaatattccaacagaaaggtgaactgttttgtttttaagcaggtgaagtacaagaagtttgatggaggccattttacttaattaaaaacttcatcaaaatgctgttttcactatctgagttgtcagaatttctacaaggctttttcatattcagtcctttcaaaaatataaaatacttgaaggcagttctttatagaagaatttaaagttacatgtcaaatgtagctcttctttttttaattactgaagccatatatggtcaagagtaacttcaggctggccgcagtggctcacgcctgtagttccagcactttgggaggccgaggtgggtggatcactaggtcagtagttcgagaccagcctgaccaacatggtgaaaccccgtccatactaaaaatacaaaaattagctgggcatggtggcatgcacctgtaatcccagctactcaggaggctgaggcaggagaattgcttgaatccaggaggcagatgatctcagtggcctgagatcgtgccactgcaccccagcctgggcaagagagtgagactccatctcaaaaaaaaaaaaaaaaaaaaagaaagtaacttccacattaaacaagagaaataaaaacaaaagcaaagttctttgtctaagcaaagcctgttaactctaattaaccagctttgcacagctgtgatagtacagcccattaattattaataagaaaataatcaatattaacctcctcttttttattggtaaatgttttttggggtctttgtgttaatttgttattttttaaattactgttttaataaatttcattatagatgctggagtaattacattacctaaaaataagatatagtcatgtagcacattactttgaagagaaaaataatatttgtaactttattaaccctatactaagcacattagtttcatttttgaaccttgaaccttggtatttgatttgcagtcctttccaaatatttaaatttccatatttactctctattctttactaaactctactcattgccttagattgaaacctaagtatctttttaaaaaaaaacccttttatgtggctatagaacagaattaggaagtttgctaatcttgaaccttgctttcttaaatggtatttttgttcattctcttcctaaactttatttttttattatttctctgctttacaatttaataagccattttactggagcttcatactctactttctatatcatataatgggaatagttttaatgcttgtgaagacagcatgtattcagtacacaaagatgaaaataatttaatcatcttcatacttattagaaatacttatattattcagtcagtaactgtgactattgaacttatctcccaaggatattataaaaataaatgtgataagagctaaagaaatttttaaagtcatcaatgattcattttaatctaatttcatcactggaatttcttgaatgttgtaagagtttatgttagtgtgtcatctaatcatagttactctaactggctagcagcttagaacaagcttgaataaggttcaaactaacagtggatgactgccaatggttagaaaaaaaaaaaggaaacattaagctacttctaatctaaattaaaatacaaaaaaatcattaaaatctacttttattttatgtcaaaattgtatctcagatactctgatttttaagtcatcaatactgttttgaaaactggacagaaatagtcactggctaacagctaaataaagagattaatcataaataagcactatctttaagcagctcacagtctactaaagcctaattaagatttataattagaaagttaaattatacagcaaatctcagacttggaggagtcctttacaccatctcgtccaaccactccatgacacagatggccaatctgtacttcattctcgttagttgccttttcagcatgccagagctattcattgacatattcagccactttgttaaataagtgtgtgtgtgtgtgtgtttttccttacaagttgagtgaaaaattaaaatgtaacaaaatagtgtgaaagcactaatcccctattccctattttcttagtctgaagcttggtgcaaaggcatcaatatcacgggcttgggattggtcacagttgagttctgtgacccttctctgtcacagactgactctggggatagtctccatggtctcagaatggagattactacctgagctgcaggaggggaatgctacctctgcctgctaaaattgttgccacctcctattgtggctgaaacatggtacttgcccagtaaagtggtgcctactatagtttttatttctgtatcaagctaaacacaaagtaaataatctggcagtagtgatcagtgatgcattgtatttactatacattaagaagaatttgtaggtctttaaaaacatcacagggatgtcatctattgcaataaatgaaaatgggatatttaattacccattaaaaattattagaagaaagagtgactatacttcccaaatgagtattgataagcctgagttcctgtaaaatggcctcgggaagctttgccttcatagcttctacattcttcacctgaaatacaaatgtgggctgttcaaagatacataggaaatactttactttgaaactgaaataggagctggggagaagtgtttctctggagggactggatcgctcctaaggctgcccaacttgtgggttttccaatgcctgaggtctttaccatttaagtcgttggatttggattttctcttgctttaaatcagaattattttatctgaggcagacagaaaaattctcaaaattgagatgaagtttcatctgatgcattaagagagtatatagaactcttgtatacttatatactcttacagactcttgtataaactatggcaaaggattctttaagacagaggccaggtaaagaacaaaatgactgaaccagactgaaaacacagcccacaccagggacagggactagtagcatcaggtgcagaattccaatcatctcctggcttgtagaaattcaaattaagatagcaacaagtacactaaacagtaattgtgagtcagcacattaattggagaggaaatgagggaaggaaaagggaaaaagagagaagttggaaggagaagaaagaaggggatgggaggaaagaaaagaagggatcgcaatgtacttaaatgtccaaaacgaaccaaaaatgttaaagaaagaacatgttgggaaaattcaacacttctaaatgctgaaaacaattaacaatggaaatgtaaaatgcttggaaccaagtgatccatatctactacaaatcaaagctaaaacattggtactattgggaaaacgttggtaatgccagccatgtaaatactgtctatataaaataacaataatatctaacacataggggaggaaaaagccacttaaatgggcaaaaataccctgtaaaccaggaggacatctaaaatggtttatgtggggaatgttatcagctaaaacacttacattacaaaaggaaggctaaaaattaattatacaaatattaatcttaaaaagtaaaaaagagcaacaaaatcccaggaaaatagaaagaagtaatataaataagaacattagataaatgttaataaaaagaccaaaagcaaattatttcataaagaccaattggtataaatatattcattaataatcataacatctttagataattatttagcattatcaaataaagttgagcttgcacgtaatctacaaatcagcaactctacttcttttaggtatatatactagagaaattcttggatggaggcacagaaaatttgtatgaatatgttcatattaacattctccataataataaaacctggaaacaaccaaactgtttatatcattatactatcagcagtagaatgctaaataaattatggaataatcaaattatagaatatgacccagtgttaagactgaattaaccacaactacatacagaaatagagatgaatcttagaaatctaatgttaagcaacaactttaaaaaaccaaaattcagaatactaggaacactaggacactatttttataaaactcaaatgagtataaaacaaaacactatgcaatgatgtggtttaggtgtgtccccacccaaatctcatcttgaattgtggctcccataattcccatgtgtcgagggaggtacctggtgggaggtaattgaatcatggggacaggtttttcctgtgctgttctcgtgacagtgagtaaatctcatgatatctgatggctttataagggagagtttccctgcacaaactctttgtttttgtctgctgccatgtaagacatgactttgcttcttttctgccttccaccatgattgtgaactcgctaaccacgtggaactgtgagtccatcaaactctttcctttataaatcacccagtctctggtacgtctttattagcagtatgagaacagactaacatgtgcatatgttaaaacgacattttgaaagggaagagaaggaaaatattacatttcagaatagttattctgggtgaaagtgaagaagatgggaatggaaggagacactgggagcatcaatcttaatgcttacactaaattctcttgttgggtcatagactcaagaggatttgtttaattggtatgccatataatctaattattaataatatatgggttcttctgtatcaagtattacataataaaatatttttaaaggcatagaagatcttttctgttctgtgcctcatataaattatctcatttactttgaagcaaacttttgaggcatttattattgccctcattttaaagatgaggaagctgaggtttagagaagccaagaaacacagttcttgagagacatagctagagttcaggtctgtaccgtagccccttcctttaaccattacactgtctttctccatttggaccctttatagagggaagatcacagcactgacccctgttctcattggagtaggaggtgctgagagagctatgtaaaaagtacacactggagagtggaaaattttcacagaaatattgacacataaacttaggcaaacagaaggtagaaaagatgtttcaccaccaaaaactgtccacgtagagatgtggagagaaccaagaacctggaggatgtgagcacagtgggccttctggcatggcagaagcagagggaagtgaaggagggaacagcagtgctaaggatagaaatgcaggtttggtccagttgaagaaggcacttgatcttttcgggctgaccagtaggtcttaaactgtagtgcatattgttatcacctggcagacttgttaaactgaaggttgctgagccccattctcaaaatttcagactcaataagaatgagtggagcctaaacatttccattctaacaaatgctcaggtggaaatcactttgaaaagcaaagctttagggctggcatataaggaggattgcttttagaatgtcagtgatggtgaagctgtggagaatgggctggggagaaagaatgaacatggagagtatagttaagccactgcaggagctcaggtaggtctgaaacagtggtggtggagatggagagagagtgctgcagttgaggcatgtctgaagtctatgaacataaagtagtaaggcatgagttgggggcataaagatagagaggctcccaagctcctgccagaggtactgagtgaagagtagactcattaatcaatgcagggacaacagagaatcaactcaggtgcccatcaacggtagactggttaaagaaaatatggtcacaaataccatggaatactaggtagccataaaaaagaacagaattatgtcctatgaagcaacatggatgtagctggaggccattatgctaagtgaactaacctagaaacagaaaaccaaatactacatgttcccacttgtaagtgggaactaaacattggggacataaatatgggagcaatagaccctggggactgctacagcagagagagacggattggggcaagggctgaaaaactgcctattggatactctgctcactaccagtcacaccccataccttagcatcacactatatatctttgtaaaaacctgcatctgtacccctgaagctaaaataaaatttggaaaagaaaaataatcgatacataaaataaagagttatgctggctcacacctctaatcccagcattttgggaggccaaggcagatggatcacttgagctcaggagttcgagatcagcctgggccacatggtgaaaccctgtctctaccaaaaatataaaatattagccaggtatggtggtgcacacctgtggtcccagctacttgggaggctgaagtgggaggaccatttaagcccgggaggtgtaggttgcagtgagctgagattgtgccactgcactccagccagggtgaccaagtgagacttcatctcaaataaataaataaataaaatgagagaaaaaagaacaaacaaatactcttttcctccaagagggcactagaaagaggatacataatagtaacttttagaagagatttataaaaaatagagtgtgaattaattgtctctccccttggaaacaagagtttaacataaacaacatgggtttgcagatgtgtgtgggcaggatagggcaagaccaaggacagcatggtatcagtgaaggaaatgtgtaggagagtccagaaaacagcagccagttgagaagttcgaagcctgtcaaggaggatattttgatactatttacaaggtacttcacatacacgcatgatattttgtggcaggtaatagtaaggatgtaatattgatagaagagggagagctatgaaattgactatccccaagtagcaaacaagaattatagggtgaattatcctctcctatccctgagagaaagcaccagattgggcttctgtaaatgcaaaatacaggatgaaataaaggctcagtctgacagcggaagcttttggtttgttttctttggttgtccctcaaagtagaaagtaaagagaaggaggaagtagttcaaggtgcaaagatattctgaagtggagaaggaagaagtccacaggagtcatatgcagttaggtaatctggataagagcaaaagtaaactgaaatatgcagtagggtttgcatcatgggaacaaagaagattaatttgatgtgagtgatatgagctagggaaataatttaaaaattgaaaaaaatgtgaataataattgtagagattattccttttataaattgtgttaatacacacttcttttttaggggctagcatcacaaaattaccagaagcattgtgttgttttgccaattaaaggaatccaaataactccaaaatgattaattaccactttctgtaaatcctcaggtgaactcatttgcacagaattccctgcagttgtaaagaaaacagaacacttgacaacttgtcaggcacctacattcttttttccttttatttattaaattcttttactattacatgttattttccacagatgttatgtgaaatttctctcctaagcaaaataaataacttttttaagaattagaaaatctaaaggacaaaattttatattataaaactatacatagtattttattttgctggcataaatgcaaataatcatcttacagaaaaacattaatattacgttttgacttctttccacatgacatctacaaggcaaataacattacaaatcctcagtactttctaactgatatatggaaatagtgtggaaaatcacatgtagaattacatgtagtatgcttgtaatactgatttcctacaatgtacagatagggtaatactctgtccttggaactttgctgagaaagtatcaggaaacataacaggaaacatatcagaaacaactaaatggtgatttgtactaacattaatatattgtttatatataaataactctatacacatctctaagtataaatgcacacatctgtatgcatacatttattaacatccattgatataccacaaaaagtttgattaatcattttgagaaatacattaaaaaagaaacaaaatttttaatcttctccttactctatgacttccaatcttgggctcacattaacaccacttttttttgttgttgttgttgagacggagtctcactctgtcgcccaggctggagtgcagtggcgcgatctcggctcactgtaagctccgccccccaagttcacaccattctcctgcctcagcctcccgagtagctgggactacaggtgcccgccaccacgcccggctaattttttgtatttttagtagagatggggtttcaccgtgttagccaggatgatctccatctcttgacctcgtgatccacccgcctcggcctcccaaagagctaggattacaggtgtgagccaccgtgcccacccttaacaccactttttgaagatatctttaccttcaaggggtatttgtatcccaaatatattcagtccattgtctggcacatcatctgtcacatatagagctgcaagaagctcttccagtatcctagcatcaaaagaacattctcttcatgaccatttcactgcacctcagaaaaacaagaggccgaattcatcttcctagtcatgttgtggtgtaattaaatttaaaggaatcactacttatgtaatgtattttttccctttaagttgtctggagtaagttttggagaaacttgcatgataatatcaaaacttgttttcttattgtgttcagaaagcaaaagagaaatattaacattatttttagccttcttgtgttactggaaccatgtcacagaatgagagtttctctgggaataagatgtattgcaatattctgactaacagaatgtcagagtaagaaatttttatcagttgttctttgggtcattgtcacacatcatctgcatataatttccatagcagtgaacagtgaatgtgacattagcttcgcaatggtgttggcttgagggctggatataccgatgtgcattccagtcatggcaattcctggagaaaaaaaaattaattataatcattttgcataaatcaccatgaacaatgaggtactcatcaccttgtcagttagtttgcagcattcagttggctggcaaactggtgactttatgaagcattaaactatgtcaccgttagccagattaaactcactgtaacattatacttacataaagtgctttgtgaaggaaatatgaaaaatgttaactgaaccgatctcagaagacaggaaaatgattgtgatataatgcttgggttgaatattgtcactttcctggtgtaagcccattatggtttccaaaggactatattcaaataataagaaaaaagtcaggactctaacttggaagatgtaaagacatatatatattagatgaaatactctaaatgagaaagaaagaaaagaagaaaagggggctgtaaaatgactcaccatgtacagtctagaatcatagagacagggtgggagaggcccagagagagttgaagggtccagtatatttcacccctcagattctgtggattagaaaccaaagtctggagaaggttaagtgtctagcccaagacatagctagaaggtggtgggtccctaacctcgaatatagtatattttcacaggagcctaaatgaaatggaattcagggagtaagataaagaccagttttcattaacatttgcgttaaagttaaatatcatttttatgagaagacaaaagtaagatcaaatcctgaagtcaaagtaaataaccctgtgtaaaaacgcaaagttcatgggctttacaggctgtgctcacaagtctatgaccactgcttggaaggaacaggagtggaggctgtggcttattttcctggtggcatgtggtatgagccacaattttagtgaaagggtacagtcatgtcttaggtctctggaaactgcctaatgatttgatatcctggagattttttctggtctgctttatggaagacatttatatataggacagtgaaaaacactatttctggaggggaaagaacaatacggttaagtctaggttttctatttcttcttgagtttgttttcttttttgcttttagatttctaatcagctcaaaagatctccaagtctccaaacccttcacgaattaaaaaaaatgtaaaccctacaaatttcttaactccatctgcataacactgccacagatagaaaagtgtaaacaagataacaagagcatgggcaactctgtttttaaaaaagcaaaactgaattttattccagaagattctgtcctgtcctgtttgtaagctacgctgccaaaaatgagtgccaacactttgggagtggggagtgtatattgtttgaggtataaacatgattataatgtacaaaaataataatttacaaatgaaccacaatttctaaggttgcttcatatatgtcaattagtaaataaataaatgcataattaaaagaaaattgaagtaaaatagtcatttggtctcagcaagactctcaacaccagccaaagcatgaaggaagtaatgtccttttctctattcaagctgttacagctttctccagtggtcggaaacattttactcttcaccttctgataaaatcccagtcagctgcctttccctggtccgttcctccagcctcccatgaagaagtgatccttctcttttttaataccacttcttctcctctttatgtcttttgtcacatatcactgaaattttacccaaggactataccctctttctcctaaaagttccacctccctacttctatattctgatccattagttctcagtgtggtcctgggaacttgttaaacatgcaaattatctggccccactgcaaacctactgcatcacaaactctggggtacagtccagtattctgtgttttccccaccctctccaagtgactcagaaacaggctaacatttgggaaccacagctctaatatattctatcttaaagagaaaaaaaaaatggtactgcagccctgggtttcccttctactttccttcttccctgaactgtcaaattcctcagagtacttgttccctttcctttctcttattacatttgttttccaactcactggtcatactcagtgtcgtttggcattttgaggaattacatgttcggattgatttttgtgctgccaaataactacaatgctttctaaagttggaaatacagttgtgactagtggatgattagattcttctttgtagctctatttgactgtaatgggcgcaacttactggttttaccccagactagtccagaaaattatttagtgaacagaattgtatttttgcagtctaccaattatatcactagatatcttggaaaaaaacgccttgcaaagtagtgatagctggacaacctgggttgtgatcttggcttcttcattgtgtgacaataatataatacttaattattcttcacaataatattagtagttaattactcgttgctattagtaattattttgcttgctcacaaaattcaaggttattcatgtatttttctatctaaagcctcataaagcacagtgaagtatatttaatatcaattttcagataaataaatggaagtttagtgctattagggaacttgtccaagttaatgtagctaaaagtaggcaatgagctggatttccaaccaaggtctgtctaagcctgtcgaacaggctgctaatgaaaccttctgggaagttgttgtgtagattattctatttatgtattttattagttcattcaaaagcagtgttaagcctctgctttctggggtgcactaggctaagccctggaaacacagagaagaaagatacagcccacaaggaatcacattctggtgaaacaacagataactaaactatttaagtagatttttgtaagagtcatgatttagaggcacacagagcattgagggaacatggagactatatgaggtacataacctgggatggggagctcatggaagccctgctagggtcagtgaccttagtgttttgttagagaaacaagagccaggaaataaattgaatgaaaggaatgtaggaaaggaacctcagacataaagaataccagttgcaaagcaggagagagtaaataaataggcagaggtaagattacaaaaacttccatgcccttcaaaggaatcagaatgtctagaaggcaagaggaggagagtagggatacttttaagacaaaatgagagttagaaatctcataatgacaatactgtggaaagtggatttaagcattagaaggaatgaatgccaataattatcttagattgttttttttttcttctaaaaaaaagtggggggagatacatgtgcagaaggtgcaggtttgttacatagttatacatgtgccacggtggtttgctgtacctattgacccctcctctaagttccatcccctgaccccccaccccccaacaggccctggtgtgtgatgttcccctccgtgtgtccatgtgctctcattgttcaactcccacttatgagtgagaacatgcagtatttggtttttggttcctgtgttagtttgctgagaatgatggcttccagcttcatccatgtccctgcaaaggacatgatctcattcctttttatggccgcctagtattccatggtgtatatgtaccacattttctttatccagtctatcattgatgggcatttgggttggttccatgtcttttctgttgtaaatagtgctgcaataaatatacgtgggcatgtgtctttatagtagaatggtctctattcttttgggtatatacaaagtaatgggattgctggatcaaatggtatttctggttctagatccttgaggactactgtcttccaaatggttgaactaatttacactcccaccaacagtgtaaaagtgttcctatttctccacatcctctccagcatctattgtttcctgactttttaatattcgcccttctcactggaatgagatggtatctaattgtggttttgacttgcatttctctgatgatcagtgacgttgagctttttttcatatgtttgttggctgcataaatgtgtttgagaagtgtctgttcatatcctttgcccactttttgatggggttgtttgttttttctggtaaatttgtttaagttatttgtaaattctggatattagaactttgtcagatgggtagattgcaaaaattttctcccgttctgtaggttgcctgttcactttgatgatagtttcttttgctatgtggaagctctttagtttaatcagatcccatttgtcaattttggcttttgttgtaattgcttttggcatttttgtcatgaagtctttgcccatgcttatgtcctaaatggtattgcctaggttttcttcaagggtttttatggtttggggttttacatttaagtctttaatccatcttgagttaatttttgtataaggtgtaaggaagcagtccagtttcggttttctgcatacagctagccggttttcccattaccatttactgaataggagatcatttccccattgcttgtttttggcaggtttgtcaaagatcagatgattgtacatgtgtggtgtgatttctaaggtctctattctgctccattagtctatatgtctgttttggtaccagtaccatgctgttttggttactgtggtcttataggatagtttgaagttaggtagcgtgatgcctccagctttgttctttttgcttaggattgtcttggctctatggcgtcttctttgattccatatgaaatttaaaatagtttttttttctaattctgtgaagaatgtcactagtagtttcatgggagtatcattgaatctataaattactttgggcagtatggctaatttcacaatatttcctatccatgagcatggaatgtttttccatttgtttgtgtcctctcttattttcttgaaaagtggtttttagttctccttgaagaggtccttcatgtcccttgttaactatattcctaggtattttattctctttgtagtgattatgaatggagttcatgatttggctttctgcttgtctattgttggtgttaaggaatgcttgtggtttttgcacattgattttgtatcctgagacttggctgaagttgcttatcaatttaaggagtttttggtatgagatgatggggttttaagaggagccagctatctggattctagattttatgggctaaatggtgtctctcccaccacaacatttatattaaagggagcttggtactctaagccccagtaactcagaatttgactgtagtgagagatagattctttaaagaggtaattacgttaaaatgaggtcatatgaatatactgtaatacagtaaaactagagtccttataagaaggggaaattaggacacagacccatacagatgaaagaccatgtgaagacagggagaaggttaccatctaaaaggcaaggagagacagtagaagaaaccaaccctgctcacaccttggtcgcagacttctagcctcaaaaatcataagaaaataaatgtctatggtttaaatcacctgctgtggtgctttgttatggcagcccacaccaactaacacacaaaactgaaatttcatattttcattgatggctaccattttagatcagaatgacaactatatgctggacagattcttctgtagataacatcagacccacctagcaaatgtgtgctgaatttgctaaaagtaaaatattagctaggaatggaccatgttttcctttaatacttttgttaagacacaaacaccaaagactttccatttttgccactgtcttttctaaaggatgaattagtatgatataaagcatttgaagccttaagatgaaggaacactgcattaagttcaatgtaatcttcactttaaatctcttcttgagtgaagagtgcaaacatgcatccctgcctgaacacaaaggaataaaacctcgcctaagcactcctgacagtctttcatgcccacttgagaactggtcatctggaaccagccatccctacagctaccagaaaatacaacttcctctgtcactttcctgcagtatcacaaattacagaatggcacaagcgtgaaagagcaactactgaatgacgcgaaaaatatacagctaagagtgtgcaggcgagtgcaatggtgaggctcaaaagacttggtggagggtaaaacacagtgtgatcctcaagatttgccaccacagctgacttcctaattactactatactgctgttgaggcaggagaatagggtctggaggcagggaacctaaggctgatttacgcggacttctagaactaaatcaaaaggaaaaccccaactttccacacctaagtaacaaaaggactggaggatacgccctttgcaatcccccctccttttctgtgtggcagatagaaaattgaaagtatctctgattggttgctttctgcaaccaatcagatgattgcataggagtataactttgtaacttcacttcagcctctgattggttgctttccacaaccaatcagactagttgcacaggccactacttcatttacgtagggtatacaccaagtaaccaatggaaaaacctctagggggtatttaaaccccagtaaattctgtaaactggcccttgagtccctatgctcgggcctgcccccccgccccccgtggagtgtactttcgttttcgataaataatctgcttttgtcacttgattcttttcttgctctgtgtgtttcgtccagctctttgttcaaaacgccaagaacctgtacatcctccactggtaacactatctctgaataagataaggagtaatattagagctatcgttaataatataaataataggagatctctcttgccggaaaaaaggggaagcaataggcaagaaattagacaattcacccacatctacgctgctattaacaaaccaatgaacaggtttttctcagaagatggagaatatccagtaatactctgcgtgaattagaacatttggtgtgattaactgatttttgaagtgcacatattttgcctgactcttctaacttataaacaatgtctaaggatattaaaacattttcttcaatagctttatattggtttctaagatatctttatgaaaatatttgttttctaagatgttgaggtaattcagtattctttcagtaacttttgttttttctttaaaattgtccaaaaattttgagctctaaagtttaaaatatttgaagacttttgcagaaagtttttactaagacttaagcaaaagcgacttcagaaacttggtaatatggtattgcatgcctaaatacttgaaaaattcctatgattctttaaaaatactttttgaaagttcatgcctaaagacaaatgaaaaacttgattatttcaaaaacttattgataaatctattttactttaaaaatatctatttaaaacgtttatttataaaatggaatatataaaatgtgttaacactgcctaaagaaaagctttaagtaaaacttggctaaccaaaatgccagcatagttggtttccaatatcctttttttttttttttttttttgagacgaagtctcgtaggcccgggctagagtgcaatggtgtgatctcggctcaccacaacctctgccacccaggttccagcaattttcctgcctcagtctccagggtagctgagattacaggcacctgtcaccaggccaggctaatttttgtatttttagtagagacagggtttcaccgttttggtcaggctggtcttgaattcctgacctcaggcgatccacccacctcagcctcccagagtgctgggattacaggtgtgagccaccgcgccaggctggtttccaatattctttgttgaaattgtctgttgttgttatttggaaacaaagacaaattgcaatttgcggattttaccatcactgctgttttgttgtttaccaaacgaactttaaatttactttctggaagcttactcagatgcctcctaatcctgtacattttatacatttatagtaattttcagtgatagtttgtcatatgaataatgaacctaaaaccctgaatcatttgtatttatcaaggaaagactactataaattcattgaaatgtctttattacaacaagaaactgcaacaacaaacttttgaaagatttataggaagaaggaatgggtgattgtggataccagagctgagccagaatttaacaagaaagagcaatggcctggaatattgccctctaactagctaatcaaaggacttttttttttttttttttttttttgagacagaatgatgctctgtcacccaggctggagtgcaatggcgtggtctcagctcactgcaaccttcgcctcctgggttcaagcaattctcctgtctcagcctcccgtgtagctgggactacaggcgcacaccgtcatggctggctaattttttgtattttattagagatggagtttcactgcattgcccaggctggtcttgaaccactgagctcaggtaatgcacccgccttggcctcccaaagtgctgggattacaggcgtgagccaccgcgcccggccctaatcaagatcttagcatcatagcatgagttaagggcaaatacaggttctcctcacagtctaagggctattaattgaataattaatagtattaaaatttcacagcaagatgccctatgaaaataaattcaacttaagtgatagatattaagaaatgcaaaactttcattttcagataatatactatgaaagctaaaacagtatactacgtttcaaactcatttagtaattattcaaacatataacaatctcctgctggtttttaaatggatgttttacattatgtgccttctcttcaaatgtggccttttctaagttttgattgaatagaatgggtttttttttttcaagatcaagtctttttgtagggcttgttgttgttttttattgctagctaagtggttccttggagattgtggatgaatattgagattctttagagaaatgaagttcgtctgttacaattacactggcatgcttccttgagaaaagcagaggatatacagaaacatctaggaaagcctgtacatttttgagaagttagaaaattagttcccgattttcttttcttttgaaaaaaaaaaattttgtttcattatctcaagaaatgtggaattagctagagagggttgtcttatttttaatttgaaggagtggattcaagtgagaattaatataaacacatgctaatagggctgctttatgcttatgaggggcaagttcttcaccttcagccacactcaggcacaaccatgaagtgggttgagttggctctcagatcctcagccagtttccccctccccctccccctcctcctttctcaccacttgctgtaccctgttttcttccctctggcacctggtgttctctttacccactgctgcttctcccctgttgctccagagacaaccagtgctcaagaaaaaaaaatagtaaatgacttccatgaaagcatcttgaaactccggtttagacagagtaatgccaagacttgtgagagggctgagatttcactctgcttacaaaccaacaagcttgctaactcctgcaacagctccacggatgctggcagaagacatggcttctgggtctgggatgaaggacagcttattgctcgtagcaatagtggacagaatatcaacattttcatggattccctgagccctaattcagagggtctgcatacagcagggtggatttcaggagagaggtctcaagcttaggaaaccacaatcctttaaaaaggactgcaaccaaagctgcccaacatacaccccagagggacattatctttgttctagtggacagcaaatacaccttcattctgcacaggcagacgccaccatttctaccttccaaagtggttcactataaaaagttttttagaaaatgtccagaacaaaagatgattagtgtctctgctcacaagggcagaaaagcaacagactcatggagaagtctctcccaacatgcatatgttctgtgtatgcaggagggaggaattcatgggtgtaaagttaaaatagggcattctataaagcctacccaataaaataatgtaatcttacatttgtatggagaagagaaagtcttcgttgtttttgtctgcttgtttttgtaagatgaactataaaacataaagctcaaaaaatgcatggttgagatgtgtatgtaattgaagtattttcaactgagggtcatgttagtgttttaatattggcatattttagaagagtgaagatggatttaaaaggtagagaaacactggcttaatcaccgattatccacagggatgtttacattcagtggaggctaaagcctaattctaacatgatttcagtcatcggccaggatgtggggcagtgttttgagggtcagagagaggccttttcacagaaattactccaaaagaatggaggcctactctatatctaaaacattgtctgaataatgaacacaataattaatttgcttacattccttttaggaaatactgaacaatttctttgaattccttcagggatcttcgatatttattatacacatttcagtaaagaatgttaaaataagtatccctgtcccaaacacccagtctgtttctggtattttgaaggcgtgaatgtctcattaaccgagacaatgggaatgatgctaagaaaagctcttttttatttaactctcatgctcagtttatttttattctcatagttattatattctttagaaatattatatcctggtttctgcagttacactacttaagcaatgtcagtaacacagtcttctgcatagctccttgttagaaaaaagcttccctaatgcacagacataggagagggagaatcaaacagtaacacctcttgacatcctcaccagcactgtcactgggaactaattggaagataaactcggagaagcttattaaccctcctaatgtggataggaattggataggggcagggtgatagaaatcagtgcagggcaaaatgtgggtgtccctttcactttcacagttcagtaagatataaatactgtgtcatttttgttttcttgtttgctttttatttttagagatagagggagaaataatctagcattgtacattaaagtaatacattagaaaaggaggaaaactaatacaatatttttcctgtagcaaaaccccagaaatgcaaaaagacaagcaaaaagcaaggacttgagcttacacaatagaacgaatgtcctttacataaaatgttagcatatctgtaccaataaactaatttctaaccataaatatttgcattacgagaataaagatgaaaataaaccaatactttattaaatgggggtaagaaaattctcaagatagaatgaaagaaaaaatagtaaagataaaagtaggaattaatgaaaaagaataaaaattaattctcataaaagacagttgccaaaataataaaatagtctaacatccaaaatcgggctagcctgatttaaaaaaaaaaaagaaatctaaatgctccaaaatagtgatggaactacaacatgcaatctgaaacagtagagaaaatgaagacacaatttaaagcatgagaaaatgaaaataaatggtaaaaagtatcatgcacaatgagattatgcatgattcttttacaaatctgaaaatgtgtgaaacaagttattctgaagggaatataggttgccaaaataaaataaaaaaacatttatagatgaagaaaggtacagtatcaaactgtccattaaccattgatcaaaaattaatgtcctctaagagatattaggagaggccccaagaatgatagactggagtaggaaaatgtggcacatatacaccatggaatacagccataaaaaaacggatgagttcacatcctttgcagggacatggatgaagctggaaaccatcattctaagcaaactgtcccaaggacagaaaaccaaacaccgcatgttctcactcataggtgggagttgaacaatgagaacacatggacacagggcagggaacataacacaccagggcctgtaggggggtagggggctggggtagtgatagcattaggagaaatacctaaagtataattaaaaaaaaatatatatatatatagtcaatctttcaaggaatagatcaatattgttatggacacatttccagactgtagagaaatatgaacaactcttatgttcaaatattccataagtctgattcttacacatgataaaatctgtctaccacaggaaaaaaaaaagcttcaagccaaactcatttttgattatagatgctaagattgaaataaagaaaaagtaagttacattgagctgtatagacatataaaatagcactttaatacattaataggtaaacttagtttgcaaaattatttacattgacacaaaaagttatttgataaattcaatactcatttctgattaaaattttttgtaactgaggggggaacacttatttcatttaatttaatattttaatttattttgggatggagtctcactctgttgccctggctggagtgcaatggtgtgatcttggctcactgcaaactcggcctcccaggttcaagcaattctccccagtagctgggattacaggtacccaccaccatgcccagctaattttcgtatttttagtagagatagtgtttcatcatgttggccaggctggtctcgaactcctgacctcaggtgatccgcccgcctcggccttccaaagtgctgggattacaggcatgagccaccacgcccaggctcttaattttaattttaattgtctaatgacagaaaccatgagaatagtccagaaatacttcttagaataacactttaatacacatagattcttgatataatttaaaactatattattaaagtaaataccttccaatgtttgcttttgcattaatattaccatgggtatcaagatagtactattgaaacaaaaacagaaaaaaatataaaacagaattcaaatttgcaaatgatatggaagctgaactatgtatacctgacactgatagttgcaatgctgtatcaagagtttccctgataagctctactactaattgtaccagctagaataaaaagcaacaatagattataatagcaaaatgtaagaaattagatctgataattaacgtagtagggaggggatgtgaagatatgttgtttagaataacttagtttttctgaaggacgtaagatagcttagaaaattaaaaagaaaggttgtgtcataagagtgtgtaatgtaaagctcttaactttccacaaagtaattattatgtttaattatattataataaaaatttcaaaaagactttttgaagacaaattgattctatagttaatctagaagaataataggatgatatagattattctgaaagaaaataagagagcagcttatgccaatatatatgaaaaaatatatgcatatagaataaatgtaatagtaaggaattgaaacaaaaatagaatagcatcaatcaataaaatagagtccaaaagtatgtataaaaatgttgcatttaaattgaagatgaaattaattatttaatacataatcctggaagatgtgtttcacaatgaaggggaaggtaaatttagattatttgctcaattttccaaagtacttagcaaatagattaaatgtgtgtctataaataaactggaaaataaacttatcttaataagcatttgttgggtctcaagatgaggaacaccatgctatatgaaacagtgaaatccatagtaaactccatgaaaggagcaattaaacacaaaatcaatttttaaaaaaatatttaaaaaccacaaatcagtgtttctcaatttgggtttctaggtacctagtgttgatgatttatatttatgattttataggtaatgtaatgtatcaatattgcttcattaattttaacaaatgtaccacgctaatgtaatgaataaatattaggggaaactgggtgcagagtatatgtaaatctaaaactctcttaaaataactcattttaaaaaatggaaaatgttaatactaagcaattcagaaaatctattacaagtaatagaaattgctaaggtaagaaaatatcattaatctcttcagcatgaaacaaatgtaccaataagttgccttgtttaacatattaaagtaataaatgggtggatttatatctgggtgctctattctgttccattggtctctgtgtctgtttttgtgccagtaccatgctgttttagttactatagctttgtagtacactatgaagttcaatatgaattcaggtaatgtgatgcctccagctttgctatatatatttcaggaccttttgtggtacaaaagtttttgggttacatgaatgaattggatagtgatagtctgatattttagttctcccatcaccagagtagtgtacatcgtattcaatatgtagttttctatctctcattccccccgccaccctccctccttctaagtctccagtgtgcattataccactctatgtctttgagtgcccatcaactttgttctttttgctcagggttgctttggctattctgggtattttgtggttccatatacactttaagattattttttctatttctgtgaagaatgttattggtactttgaaacggattgcattagatctgtagattgctttgagtatggatattttaacaatttgattctttcaatctaaaaacatggaatatctttacatttttgtgtcctcttcaatttctaatataatattattcaactatgaaaaagaataaaatcctgtcatttttaacaaagtggatgggaagtggtgaacattatgttaagtaaaataaggcagacagaaaaagataaagtagcatgttctcactcttatgtgggagctaaaaaaaataaaattttaaaaaaaaaaaggaactcagggtgatagtaagatgatacttaccagcagctgggaagggaaagaggagaaggtgattaagaagagttgcttaatgagtcaaacatacagttagaaggaataaaaactagtgtttggtagcacaataggttgactatagtccacaattaatttattgcatatttcaaagtacctaaaagagtggaactggaaagttcctaaaacaaagaaataataaatgcttgacatgatggatatccctattaccctgatttaatcattacacattatatacttacatcaaaatttcacatttaccccataaatatgtacaactattatgtatcagtaattaaatatttgaaaatgttcaaggaagcatgcttataattatcctttaaatctgtatatgtaaactcttcataataaagactaatgtagaaaaaaaagaaacgtaaaaacttcttctcaactcatgcttacaagcttctttgttaaacacttccattcactgaaagaaacaacacataaagcaactttaaagaagtatgcttagatttactttttaaacctgtataaaaaaaaaaaaaaagtaggaccaggcacagtggctcacacctgtaatcccagcactttgggaggctgaggcaggcggatcacttgaggtcaggagttcaagaccagcctgggcaacattgtgaaacccaatctactaaaaatacaaaatttagccaggcatggtggtgtatgcctgtaatcccagctactcaggtggctgaggcacgagaatcacttgaacctgggcagcggaggttgcagtgagtcgagatcgtgacactgcactccagcctgggttctctatctccaatgaataaataaaataaaataaaataaattagcagaggcttttaaacacctacattacacagtggcattaatgtagggaaggttacttttatatattatagtgttaataaagtatcacacattttctgaaagcctctttggcaatatatatcagaaaccttaaaaagattcctattttttgactcactcatttttgtaatctacctcattaaaacaatcataaaaacaaaacaggacttaacttagatggttttatttatgactatttattttgcttcggattttctcagaagaccacaaacccctctagatattttaaatagaatgagatacaatacagagaatcagaagcttacaaaatcatcagaactactggtggagcaaaggtgacggaaattactgctcatttcagtaaatcagaaactggggaagttacagaaaactgttactgatctcatatttgcaccaaggaagtgagttaatacacctgcccactgcagtccctagagcaatagtgacttccttcactccaccttcaaaattctgctgaaatgcctctcgttggcagaatttaatgtgaaaaactgttgtcaggaactctggaaaacatagttctctggctcccagccttttaataaagaggaaaatataaatgtgtatggggaagtggtggtagtggcactgtactgttaacaaaaaatgcaagaatggaaaaaataagtcagcaatttaaatgccaatactcttcagtggggaatagtttactacattggagtattcatttgatgagattgtatgcagtcattaaatatcctattctgcaatacatgataaatcatgtatcattatgttttaataaaatgagaacatttttactattaattggatgaaaatgtagttcataaagcagtagagtacaaacctactttattatataatatagcatcattctattcaagttcaactttatagtaaaactaaagattttctaaatccaaaattcaattttctagacatagttctaaaattccatttttaaaagtctatggaaagaaaatgaagttctgttaaggtatatgtagaatacctggaaaacaaagttctataagtttttttagcttaatgtaacattaagagcccataatctaaaatattacattgtccagtgatattgtcatgtattctagttgtagttacttttaaaataaatgctaagttggaaaagaaagcacattttttatggctaggttttgtaataaccaggtgactattctaaagatctcattcacttataaaccataaaattaaaaaatgttttctcaatggccataatagtggagaaataggttgcttttctccagacatagtgctttgagtctgtacttcatgaaatatcatctgtaatcatctttgtacttacgaaattatcaagatgtaattatcaagatggacactatgggctattgttggatgaacacgccttgacaaacagtcaatactttaaaacaaaacaagcagtacatgaacatattcctttcctttgcagagagtttataccctatttctaattgttgtttgagaaggtattttaatagaatggagttatttactctagaggcacactctggggggtctgcataggaatgtgagtcccaggtgttttccaggtctctctctccttactaatattactcagccactctgtcttctattagttctgttttgcctcaggtttcctaaattgtcaatattttgttttgatttaatgtctagaaagaattccaggatatatttttatactaacttttgttcaaaatgcaattatctctctttatcctcacttcagcttccataagagcatttaaaggtcagggaagagtttttaagcagatcagtttggagaagcagaaaatctctatggaaaagtgcagggtctagtaggaaagaccatgtagaaatcactatatattgttttatttactgtcccctatgactatctgaaagacctagcttaatgaagattgaataaaagcattaaaaagtaatgaagccatataaattctgggcttgggtttaaaaattataattctaaccattttataatagttgttaagatacactcacctatgcacacatatattcagaaatgtttctaatatatgcaagtagtactgtgtgtatgattatgaagggcataatcaatgtaattcaaaaaacaataatgtaatttgattataagaatattaggatttgaaaaataatagtcatattcttgctaaatgaacaattcaaattagtcacattaaagaaaataataaactttaatctgtgaaacccattattaagaaacttcatttaatggattaatctcattgcaaattgcatagtgctatacaaaaaatgattactaaattgaaaagtttccccttatgtacaagttagatatataatctgtttgtttttatgtatattgtgtttaaaatcctcatattgctcaggattaccttggttatccggggtcctttatggttccctattaattttagaattgttttctaattctgtgaaaaatgatattgctagattgataagaatagcattgaatttgcagattgctttgggcaatatgagtatttggccacttaaacaatattaattcttctaattcatgagcaaggaatgtttttctatttgcttgtgtcatctgtgatttctgtcagcagtgttttgtccttctcctggtagagatctttcacttccttggttacatgtattcctaggtatcttgtgtgggtgtggatattgtaaatgaggccatttccttgatttggctctgagcttgaacacttttgctatatagaaatgctactgattttttaaattgattttataccctgaaactttatcgaattagttatctgttctaggagactttaggcagagtcctcaaggcttttatagaatcagatcatcagtgaagagagatcatttgatttcttttctgattttcaatgccttttatttcattctcttgcttgattgctctggctagtacttccagtactatattatataggaatggtgaaagtgggcatcctctgcttgtttcagttctcaagaggaatgctttcaactttttcccatgcagtatgatgttggctgtgggttgtcatagatggatcttactattttgaggtatgttcctttgatgcctagtatgttgagggtttctatcatgaagggatgttgaattttattataaactttttctgcatctgttgagatgatcacacactttttgcttttaattctgtttatgtggtgaatcacatttatcgacttgtgtatgttgaaccagccttgcatttcaggaataaagcctgcttgattgtggtgcattaactttttgatgtgctgctggagtcacaaaatactaatttgctagtattttcttaaggatttttgcatctttgttcatcagggatactgacttgaagttttctttttcattgtgtcttttccaggtttgggtattaggatgatgctagctttgtacagtgagttagggtggaacccctcctccttggttttttggaatcgtttgaggagaattgctaccaggtctttttttggatgtctggtagaattcagctgttaatccatctgattcagggcttttattggttagtaggctttttattaatgattcagtttcagaatttgatattggtttgttaagggtttcagttccttcctaattcaatcttgggagattgtatgttttcaggaatttatccatttcctttagacattctgttttgtgtgcatggagtgtttacaacagtctgtgaggatcttttgtgtttctgagggattggttgtaatgtcacctttgtcattttttaatatgcttatttaaatcttctctcagattttcatttgttaatctagttattggtctattgatcttatttatactttaatatagccaacttaatttcattgattctttgtaatggtttttggcttcaattttgttcagttctcagattttagttctttcttttcttctgctggctttaggcttagtttgctcttgtttttctcctttctctaagtgtgatgttagatcattaatttgagatatttctaattttttgaggtaagttttagcactataaagtttcctcttcacactgctcttgctggatgttgtatctctgttttcatttattttttaaaaatgtattaatttctgccttaattttcctgttcattcaaaagtcattcagaaacaagtcatttaatttccatgtaatcatgtagttttgagggattttctttgtattgatttctatttatattccactgtgatctgagagagtatgcttcgtatgatttagatttttttgtatttattgagacttgctttatggctgaacatgtggtcagtcttggagtaggtttttttttttatttattgagacttgctttatggctgaacatgtggtcagtcttggagtaggttttatgtgcagatgataatgtattgtatagttgataggtgatgtattctgtatgtgtctactaggtccaattagtcaaatgtcaaatttaagtctagaatttcttagttttattccctgatgatctgtctaatgctgtcagtggggtgtttaagtgccttattattattgtgtggctgtctagttcttttcataggtctagaagtacttgttttatgaatctgggtactccaaggttgggttcatatatgtttatgacagttacgtcttctcattgaattgaactctttatcattatgtaatgctcttctttgccatagctcaacatcaaactatactataaagctaaagtaaccaaaacagcatagcactggcacaaaaacaggcacatagaccaatagaagagaacagataacccagaaataaagccacacacctccaataatatggtctttgacaagtcaccaaaaaattaggaatggagaaacaactccctattcaacacacggtgctgggatagactaaccgtatgagaaactagacctctgcctttcaccatatacaaaagttaactaaagatagattaaaggtttaaatgtaagacctcaaactataagaatcctagaagaagacctaagaaacaacattctggactccagccttgggaaaaaaattataactaagtcctcaaacacaattgcaacaaaaacaaaaattgacaggtgggatccaattaaactaaagaaaatgtgtacagcaaaagaaactgttaacaaagtaaacacaacctacaaaatgggagacaatatttgcaaactatgcatcctaaaaacaaccccattaaaaagtggacaaaagacatgaacagatgctgatcaaaataagatacacaagcagctaacaaatgtgtgcaaaaattctcgacatcactaatcatcagagaaatgcaaatcaaaactgcaatgagatatcatctcacacaagtcagaatggctaatattaaaaagtcataaaacaacacatactggtgaggctgcagagaaaagggaatgcttacatgctgttggtaggaatataaattagcccatccaccatggaaagcagtttggagatttctcaaagaacttagaattgttatccagcacaacaatcccattactggatatatatccaaaagaaaacatatcattttaccaaaagatacatgcactcatatgttcagcatagcattgttcaaaatagcaatggcatggaatcaacctaggtacccatcaatggtgcattggataaagtatggtacatgtacaccatgtaatactgtgcagccattaaataaatgaagtcatgtactttgctacaacatggatgcagctgaaggcctctattctaactagattaacacagaacagaaaaccaaataccctatgttcacaattataagtgagagctaaacattggtactcattgacaaaaagatggcaacagtagacactggggacaatcagagtgaagaggtagggatgtggagaagtgttgaaaagctgcctattcagtattatgcccacaacccaggtgatgggatcagttgtatcccaaacctcagcatcacaaatatacccatacaacacacttgaacatgttcccctgaatctaaaattaaagttgaaattattaaaaacaaaattgtattcttgcattaaaaatgagtacaacaaatttaaatggattgtgtgtagtttaaatattaacagttcttaaatagaaaaatgaaatgtgaacactaagagttaacttacactaaaatatattctcaaattcctggtgtgtttttaagtgaagtttccctaacatcaggatgttaaattaataatctctgagacatttaaattttgttatccagtatattagtcagtattctccagagaaacataaccaacagaatgggatatatatacacacacactcacacacatgcatggtgatttattgtaggaatttgttcatgcaataatggatactgataagtcccacaatccgctctctacaaattgaaaaatgagaaaagctattgctgtaattcagtgtgaatctgaagacctaagaatcagggaaggcaatttctgagggcggaagaggagggatgtcccaactcaaacagaagcaaattcaccctctcttcgtctctttgttctatccaaaccctcaatggattaaataatgtctatccacattggtgagggccatcttctttactcagtttgctgattcaaataataatctcttccagaaacattgtcacaggcacacccaaaaataatattttaacctcactttaggcatctcttagcccagttgagttgacacatcaaactaaccataacaccaaggaaatcatgttagtattattgcaaagatatccacaatgcatttttctcacaaatgccctttttcctgtaaattgtatcacttcatctcttaaatgccctcatcgcaaaaaaaaaaataacattgtattggtcagtgttcttcagagagatagaatcaaaaagatatatgtgaatacagatattttaaagagatttattagggatactagctcacatggttatggaggcaaagtcccgtgataggttgtctgcaggctggaaaccctgagatgctggcagcatgactcagtttaagtccaaagccccaggaactagggaaacctatgacataactctcagtctgagtctgaaggcctgagaactcagggggccactggtgtaaatcctggagtgtctgtgtagaagatcctagatttctgatgtcccaggacaggagaagagtatatcccagctccaagagaaagagggcatcacctttttgtgcttatcctcgtcctcagatgattgaatggtgcccagacacactgagggcagatcttccccacttagtccaccaactcacctgccaatctcctctggaagcaccttcacagaaaaacccagaaataatcccttaccggttctcttggtaattcttaatccagtcaagtcaacacctaaaattaaccatcagaaacatataactttgaacaatttgcgtttacctttacccactcacataaaaacaccatacgtaggagttcaaaggaatttaaattgtttgcaatttttttcttttataactaggaatgttagcaaaacaccatacggtgagacagcaaagcacagtggcttaggagcacagactccaggttcacactgcataagtttgatcctagctctgttatttaataatataggacactggctaagttatttaacctctctgccttggtttgctcctttgtaaaatggagataataaatattttctaccttatatgattggtatgatgattaaatttacttatgtatgttaataagtatattgaacaatggcctgtaagtacttaatgattaattgaaattattatatctcttattaaagatggtttgcttatatctcatatagccataagagatattttgtgattgggatcaggaaaacaggttatatcaaaggcaggtagtcacctgtttctctttgcaatatttttaaagatttgatacttttagaacagttttagttcaaagcaaatttgaaaggaaggtacagagatatcctgtatatttcctgcccccacacatgcatagcctcctccattatcaacatccttgtattagtccattttcacactgctatgaagaactacttgagactgggtaatttataaaggaaagaggtttagttgactcacagttccacatggccggggaggcctcagcatacttacggtcatgatagaaggtgagggggaatcaagcaccttcctcacaaggcagcaggagacagagagagcgagcaaagaaggaaaccaccagacacttttaaacaatcagatcttgtgagaattccctcactatcatgaggacagcatgggggaaactacccccatgatccaatcacctcccaccaagtccctgcctcaacatgtgaggattataatttgagataagatttgggtggggacccagagcaaattatatcaatgaagtgtggtaaattggttacaattgatgagcctatactgaaacatgattatcacccaaagtccatagttcacattaagatttattttgtattgaacatcctatgggttttgacaaatatataatgaaatatagccaacactatagtagcatacagagtgttttcactaccccaaaaatctgccatgctgtatctattcatccctcactccccacaacctctggcaacaattgaactctgtttttctccatagtttagccttgtccatagtgtcacatggttggactcatacagtatgtagccttttcatattggcatctttcacttagtaatatgtgtttaaccttatgtcttttcatggcatttttttcagtgctgaataatattctattttctggtctgtttgtagcacagttcatttatccattcacctactgcaagaaatcttcattgcttccaagttttgacaattatgaataaagctgcttataaacattcttgttcaggtttatgtgtgaacatatgttttcaactcttttgggtaaataccaagaagtgagattgctggatcataccataagagtatgtttaattttaggagaaactgccaaactgtctttcaaagtggccggaccattttgtattttcactggtaataaatgagagttcctgttgttttgcatcctggccaatatttggtttttaaagtgttctggattttggccattttaggtatgtaatgatatctcattgttgttttaatttgtagttccctgatgacatatgatgtagaacatctttttatatgcttatttgccatctgtaaatattttttgagatgtctgttaagggttttggtccattttagttaagtaatttgttttcttattgatgagtgttaaaagtttcttttatgttttgaaaaacagtagtttatctggtatgtgttttgcaagtattagttcccagtctgtgttttttttttcatcttctttatagtcttttggcaaagcagaaatttttagttttaatgcagtctagttcaccaactgtttctttcatgaatagtgccttgggtgtcatatctaaaaattattgccaaacctaaggtcatgcagattttctcatgtgttaatttctaggagctttctagctttgtatattacctttaggtctgtgatccactttgagttaatttttgtgaaggatataaggtctatgtagaggttcactattttctgtgtggatgtccagtagtaaagcatcatttgttaagactttctttgctccatcgtatagcctttgcttctttgtcaaagatgattgtgggtctatttctagactctctgttatgttccatttatctatttgcctattccttcaccaacactaaacactaaacttatttacagtcttatttactgtagcttcacagtaaatctgaaagtcagataatatcaaagcttcaactttgttcttctccttcaacattttgttaaatgttctgggtcttttgcatccccatataaactctagaatcagtttgtcaatttctacaacataatttgctggggttttgtttgggatggtattgaatctatagattaagttggaaaaagctgacatcttaacaatattgagtcatcctttccttgaacatacattatctatccatctatttagtttgtccttgatttctttcatcagaattttgtagtttacctcatattaattttgtaattctgatggatttttcataagcatttcatttttggagatgctaatgtaaatggaagtatgttcttaatttcaaattctacttgttcattgctggtatatagaaaagcatttgactttttcttattaacctcatattctgcaactatgctataattattaattccaggaggatttttgttgttgttgattttaaaaaaattctacatagactatcatgtcatcagaaaaaacatgatttcttccttttttctttttctttcttgctgcattagataggactctcagtacaatggcgaaaataagtggtaagaggagacatccttgcctgttcttgatcttagagggaaagcttctagtttcttaccattaagtatgatgttggctgtagattttttgtagatattctttttcatgttgaggaagtttccccttattcctaggttactgattgtttttatcataaatgggtgatagattttttttcagataatttctctgcatttattaatatacttatgtgattttttaaatttagtttgttgatgtgatggattacattaattgatttttaaatattgaaccagtcttgtatacctgagataaatctaagtaggtcatgttgtataattctttttgtatatatttggattcaatttgctaatattttgttgaggatatttgtatctatatttataggaggtattggtcatagttttcttctactgtctctgtctaggtttgttgctaagatgaggctagcctcatagaatgaggtagaaagtttttcctcagcttctatcttttgaaagtaattgtagagaattggtataatttattctttaaaagtttggtggaattaccagcgaacacttacggacctgatgctttctgttttggaaagattattaataattgctttaatttattaaatacatatagacctattcaaattctctatttttgcttttattagatagattttattttctttcaaggaattggttaatttcatctaggttatcaaagttttggacatagacttgttcataatattcgttatcttttaaatgtccatgagatctatagtaatggcccacctttaatttctaatattagtaatttacatcctctcttctttttagttagcctagctagaggcttattgattcaatttatcttttcaaagaaacagcctttggtttccttgacttttccctattgatttcttattttcaattgcattggtttcttctccatgttttattatttattttcttcttcttactttgagtttaattggctcttctttttctcatttcctaatttagaagcttagataaatgactttagatatttcttttctaacagatgctttcaatactgtaaatgtccctcaaagcattgtttttactacatccaacaaatgttaataaattatatttttatttttatttacttaaaaatatgaatatttctcttgaaatttttcattttacccatgtgttatttagaagtgtgttcattgtttaatctccatgtattttaatctccaaaatatttaaaaatatttttaaatttctcttgaaatttcccactttatccatgtgttatttagaatggttttcattgcttaatctccatgtattttaggatcttccagctatttttttctgttttttttttcttgtttaatttcattccggactataaagtaatttcaaatttgtcaaggtgtgttttattgcctagaatatgatgtgtcttattgaatatttcctgtgagcttgagaagaatgtgtattctgttgttggataaagtagtctgtagatattcattatatccagttgattcatgatattgctaagttcaactatgtttttactgattttctgcctgccatggtcatctatttctgatagaggggtgttaaagtctccaactataatggtggatttatctatttctcttgcaattctatcagtttttgcctcacatactttgctgctctcttgttaggcacatacatgttaagaattcttattatcatagttcattttgagctgctataacaataccacagactaatttataataaacagaaatgtattggctcatagttctagaggttgggaagtccaagatggagaggctggcttcctgcaaaagctttcttgctgcattatccaatggcagaaaggcaaagagagggtgagagagcaagaaggggctgaacccattcttttataatgaacccattttcacagtaatgaactcactccctgtattagtcagggttctttaaagggacagaactaataggctatatgtatatatgaaggggagtttattaggataattgactcacaggatcacaaggtgaggtcccacaataggccatctgcaagctgaggagcaaggaagctagttggagtcccaaaacctcaaaagcagggaagccgacagtgcagccttcaatctatagcagaagacccaagagcccctggtaaatcactggtctaagtccaagagtccaaaagctgaagaacttggagtctgatgttccgagggcaagaagcatccagcatgggacaaagatgaaggccagaagactaagcacacctcttcattccactttcttttgcctgctttattctagccacactggtagctgattaaatggtgcctacccagattgaaggtgggtctgcctctctcagtctagattcaaatgttaatctcctttggcaaaaccctcacagacatacctatgtacaacattttgcatcctttaatccaatgaagttgacattcaatattaaccatcacatttacataataatggcattaatccactcatgagagcaaagccctcctggcttcatcactttttttgttgttgttgagacggactctctgtcgcccaggctggagtgcagtggcgccatctcggctcactgcaagctccgcctcccgggttcacgccatgcttctgcctcagcctcccaagtagctgggactacaggcacccaccaccacgcccagctaattttttttttttttttttttgtatttttagtggagacgggttttcaccgtgttagccaggatggtctctatctcctgagctcgtgatctgcctgcctctgcctcccaaagtgctgggattacaggcgtgaaccaccacacccggcaggctgcatcacttcttaaaggtcctgcctctcaacactattgcactggggattaagttttcaacacatacttttggagggacaaattcaaaccacagcagttatggccaataattttctcctttatcaatatgagattttcctctttattcccaatatattttattgctttgaaacctactctgtctgaaattagtatagctactcttgctttcttttgattagtgttaacaaggtacttctttctccatccgtttacttttaatctacacgtgtctttatatttaaactgagtttctcatagacaacacagagttgagtcttatttcttgattcattctgacaatctctatcttttaattagtgcatttagacaattgatgttcaaaactgattattgatatagttgtaataatatctaccagcataccaactataccaattgatatagttgaagaattaatagtgatataattggattaatatttagtactgctttgtatttgttgcctttctttgttcctatttttgtcttccagtcttttttctgccttttgtagtttcaattgagcattttgtatgattacgtgttctctcctcacttagcatacaaattacacttctttttttttatttttattttttgagatggagtctcactctcttgcccaggctggagtgtagtggcatgatctcggctctctcaacctccacctcccaagttccagtgattctcctgcctcagcctcccgagtagctgggattataggcattcatcaccatgtctgactaatttttgtgttttttagttgagatggggttttgccatgttggccaggatggtctcaaactcctgatctgtgatctgcctgcctcctcctcccaaagtgctgggattacaggcgtgatccaccacacctggccacacttctttttaatactttttttttaaattgttgtcctggagttgcaatatgcatttatatataatccaagcccactttcaagtaacaatataccacttcatgggtagtgtgagtaacttataataaaaaaaaactcttaatttcttcctcccatcccttgtatcattaatgtcattcattttacttatatgtaagtatacacacacatacacaatatatacattaagtatacataattaaatacatttttcatggtatttttttgaacaaatatttacttgttaaatcaattaagaataagtaaactagagcatgggaaagctcagaaaccaacacaagatcccagaaaatggggccaggcatgcagggaaactgagcagccagcaatacctgtcaatgtcatgttccttgatatgcagcagtgatgctgggctgcagctgagagtgccgtcccattgcaaggaatatcaggtccatgcttctgctgtctcaggtgcccaagcttagcatgggttctctcagctcaagccaccagccctccctaggacccgagaaggtgaagcccttgtgtgaagtcctggctcttgtcaaggcagggtgctaaagaagaaacagaaaagaagttaagaaaaaattttaattttatctttacttacttcttctttgatgctcttccattctttgcatacatttgagattttgacctatatcattttccttgtctccaaatgacttaggatgttttgcaaagcaggtctactgacaagtccccttaatttttttctttggccagacaaagtctccatgtctccttaaccattgaaagatagtttcacaaggtacaggattctaggtttgtgggctttttctctctcaacactaaataattcactctactcttttcttgcttgcatggtttctgagaagaagtcagatgtaatttttgttgttgctgttcctctgtaggtaaggtgtcacccaccccctctctggcttctttcaggattttttctttacctttaattttatataatttgaaaattgtgtgcctacatacagttttttgacacttatccttctttatgttctctgaggtttctggatacatggtttcatgtcagacattaatttgagaaagttctcagtcattcttgtttgaaatatttatttggttcatctgtctcttctctttcttgtattcctattacactttcgtagtttccccacagttgttgtatattctgttatagttttttttttcagtttttattctttatgcttttcaattttggaggtttctattgagataccatccagctcagagaatttttcctggaccatattcagtatactgttaaccacatcaaagttacttttatttctgttacagtgttttttagctctagcatttctctttagctcttaagatttccatctctctgcttactttacctatctgttcatgcatgctgtcacctttatccatttagagcccttagcatattatcataattgttttaaattccgtgtctgataatccaatatccctgccatgtctatctgtgaggcttgctttggcccttcaaactgttttttgtctttttgtatgctttgtaattttttttctttatagccagacacaatgtactgggcaaaagggagcactttaaacaggcctttagtaatgtggtggtaaggtatatggggagggaatatgttctacagtactctgattaggtctcagtctcttagtacccctatgcctttggactgtgaacatcacaagtgtttctcagggttttttttttttttttttttttctgcctcgttaggtgggacaggatggttacattgggctggagttggttatttcctttcttccaggaaagttgggttatgatagaaccccaacaggttgaattctggttaaccagtttctcctgaaggcagaccttgttaagaacacagcgttctggcatattgcaaaatgattcattttcatcttttcctgctagaaggacaaaaagatttttctccaatatttgctgtgaaaacctggttgagtcccttggagcaaaactcacaaagtgtgggacccgtcctttgactgggtcctcctggagttttaactctcagactccttcatacttagcctctagcaatttgtcaattacagttcaagtttctatacccaacctgtgaagaaggttcatggcattctagttactatttcaaagggaggactctaaacatttccacccactgcactttgggtgcacaaatctatagtgagacagaatactttcacacaacacattccatgaagcagatttattacagataggcagcaagggacaacagaagcctaggactcatgacaaagctgtcccccaaggttcaggaaagcttcatgagatggatggaatctcatctgcatgcaacttatgtcacactgcagctaagggaccccaaaaagcagcctgtcctcggctttataccctgaggcattgtgatgcactggggaaaagcattgtaggatattctgctctaggaggaacaggaacgcagtgtgggatattctagccagttattccttatctcaagatgttgcattcccagcacatttacagctattaagaactacaagggccaggagcggtggctcacgcctctaatcccagcactttgggaggccgaggcaggcggatcatgaggtcaggagatcgagaccatcctgacaaacatggtggaaccccatctctactaaaaatataaaaattagctgggtgtggtggcacacacctgtagtcctagctacttgggaggccaaggcagaagaatcgcttgaacccagaaggcaaagcttgcagtgagccaagatccagccactgcactccagcctggcaatagagcaagactcaatctcaaaaaaaaaaaaaaaaagaaagaaagaaaaaagaaaagaaaaaagaaaaataactacaagcaagaaatcaaagagagttgggttggcccaaggccacctggagaactgtcagccagcgcttgttcccatagaggtttttgcttcagcatgttgtgattctctgtatccctcatctgtctctttaatctggggggcagcagtttgccctgtgaccttacttctgttttggatctaagaagagttgttggtttttcaatttgctctgctttttatgtgttgttagaatagaatggcaacttccaagctccttacatgaagaaccagaaactacaagtctccataccatttttcaagtatggctttacatttttaaatgattgaaaaatcaaaacaatgatatattctgacatatgaaagctacacaatatcaaaatgttagggtccataaataaagttttattggaacacacacagcagagttaaatatggcccaaagcctaaaatatttactataaccctttagagaaaaatgtagctgacctgtgggctatgtgtgctaccgtaacagtgtgacactttctacccttcttgactagaatactaaaataatccaataattattttatgttttccaggaaatcaagtaaagcagaatattattaagaaacctttagttagaatttttaaattagaaataatttctttcatagtcccagaaagtatataatgggtgaagtatgaatgggtgaagtatgaatgggtgaagtatgaatgggtgaagtatgaatgagtttgaatttgcataactgttaacattatccatgtttcccccctctctatatatacacatatacacacacataaacacacatatacaccagtgatatcctctacaatgaaacatattaattattcctgtactttatttaacaccaaagtttcttgattttgtttttttattagtagatagggctattttctgaaccctcttaccaagtcctctaatgactttagagacaactgtatcttatacactttttaaaagcaaatctcccttccttgtccagtatgttgtgagcacagcgtagaacatttgataaagacttagtgacttgaattaaattacttgcagttaagtaaaacatcccaaatcatgaaccctcaattatcttgtctgtgtttaccatgtcctaaggcctttcaaatagaagtgacaatttaaaagttctaaaataattacagcaccatattgctcactataaagtacaactgtcaattacaaattcaattatcagtggccacttgtgaatctagagaacttcacaaatgttctgtcttgtagctgaactggaaatgtttttagggttgccgtttgttttatagttttaaatatttataacctgattaattattttcctaaaatattttcgttctagctaaaaaatgtgctaggaacaaacacaatacctgctgaaagtgacttttgtccctttcggtgtagggataaatgttatcccacctaaataatatgactcttgtttttaattaggtttaaagtaccctttgcagtttgacctttccctggaatgatccattttctatgctacattttatcatgctgccagtaatgtcatcaaaaacttttaaagaacatattaaattggctttaaatttatattgagctttaaaatgaaacagcattaggacattgtgcttctttgttttacacctgcatactcttaacattccggtgttggagactggaattcttttcactccaagtactttaagttaggaaggaaagaaggaaggaaggaaggaaggaaggaaggaaggaaggaaggaaggaaggaaggaaggaaagaaagaaagaaggaaagaaggaaagaaggaaggaaggagggaaagaaggaaggagggaaagaaggaaggagggaaagaaggaaggaaggaaggaaggaaggaaagaaggaaggaaggaaagaaggaaggaaagaaggaaggaaaggaagaaagagagaaaggaagaaagagagaaagaaagagagaaagaaagaaagaaagaatgaaagaaagaaagaaaactaagaagttatttatgctttgtacaacagaatgggcacacaaggattctaacaaggatttcaattctaatatcagcacttagcccctcaatgtctttgagcatgttaagttgcaaagcccaaacggccttatctgataaggtgtcattatcccttctttgcaatgttcttgttagagttagaaataatagatgtagtgcaattgtcaccataggccctcaataaaagatggttgttgttgcagctgttgcaatatgatcgaggtctttactgacccagtgaaaaccttctactgcttgctctaagaaaccatttccttcttcctaattagtcctcagtaaagtgaataagttattagagaacatggtctaaaaacaatcatttatattaggacttcatcgtgtagttgaaacgtcatgccatggcttggaaatatcatggaaatgtggcatgaactcttcccggggtggtaggagatcaatgaggagcattgggagccaagaaaagaagccaaaaaaaaaaatcattagaggaaactttccttctctcacccatgtgcattttgaattcaacatatcgttggcaggttttctttaggtcaaggacagctttaaagaaaactgttttagatcctccaactctccttcataaacctatcccactacatagctttacaaattgcctcttttggagattttcccagaactatcctcttcactctgcacacagcaagaaattagccttccgctcttttactattccgttcctttacaattcatgctacttcagtatacttaacccagaatttattcaagttttatgtgttaatttaacaaatatttatttagtgactacctttattgtaccagttaaacatataacaggaaacaaaactcaaaaacagttctgtcctcactgagcttatattttggtggaaagatacagacaattaattgaaccaaataaattatagtgtatattagaaaaggataagggctgtgaaaacaaataaagtaaggaaggggagtgaaatatactgggaagtagagtttcaattttttagaaacagcttccctgagaagatggcaatttagtaacataaccaaggttgcaagtcaggaggttattcatggtgaaagcaatgtaggaaggaagaactgcaagtgcaaaggccaggaggcaggaagatgccctgcatggtccaagaagataaaggaagcccttctggttagatcagagaagatgaagttgaatagggctggtgtggagggacctggagaatatctagactcttgtaagctactgaaaaaaaaaaatgttggcctttagtctgagtaggatgggaaacatttgaatatttgaatgaagaagtgaaatgatctgacttgtgtttttttaaaagctcattctaactgccacgttgaaaatggatgataggaaagcaagttgaaaaaggctgaccagttagaaaatattacaaatatccaggtcgttttattggtagggctagaaggaagtggttggactctgaatacgacgtgttaacagatggacgaaagggaacagtgacagtgagggtcatggaggacatagaggtttttggtttttgccctggagtattagaaagttcaaagttgtcataaattgagatggcaaaggttacatacagcctgcttttgggttcagtatcaggactgcaaatttaggcatgttgactttgggctctctactcatgattccagggaagatgtggaataggcacttgaatatagaaatctggaattcaggggagacatgatctgggggtgtacaacttgaagaattcccaatatagagatgatatttgaagttgtgagactgaaggagaatgctaagggagtgagtgtagaaagaaaaggtggaaagtctgaggctgatcttcatttgcactctaatattaatcggttggtgagagaggaagaagcagagagtagaagcagatgatggaggaatggctaaggattggtgtaaaggcctgcaaataaaatcgtgtcaaggaacagtagatgaacaagtaggtcaaatgctgctgaatagtcattaagatgaggactgaaaataatgatgagcctaagaaatgagttggtgtgcctgtatggagtagtttcaagaaagaatgaaagtaaaaagctattgaaaccagagaatacagattcttacttttgaaagtgagttttgctacaaaggggatcagaaaaattgggtaataggtacagaggaaaacatggttatgattatttttaatgaaagaaacgtgtttgtatgataatggaaatgaatcagtggaggctaaaacagtcagtaatgtaggagaaagggggaattgctggagaaatttccctgagcaggaaggggaaaggggctataagatctggtgcacaagagaaggatccagctttaggagcaaggacaattaatcttgttaaaagagggaagactgagcagatgactcactggttagatgtaaacagcctctcagcctttcttggagcattctcatttagatataagatactatttaagtaacgaaatatctaatcatatcatttcagtaaatttaaatgaagaatttccattaggatatggaactcacttttttatttttttattatactttaagttctgggatacatgtgcagaacatgcaggtttgttacgtaggtatacacgtgccatggtggtttgctgcacccatcaacccgtcatctacattaggtatttctcctaatgttatccctcccctagtcccccaccccccaacaggccctggagtgtgatggtcccctccctgtgtccatgtgttctcattgttcaactcccacttatgagtgaaaacatgcagtgtttgggtttctgttcttgtgttattttgctgagaatgatggtttccagcttcattcatgtccctgtaagagacatgaactcatccttttgtatggctgcatagtattccatggtgtatatgtgccacattttctttatatatatatatatagagagagagactagatagaaactcttaaatcctaatatgcaaatctaacctgggaaaaccattacactggttaaaagtagcccatttgggatgcacaaaattcatttttttccttatgcctgacaggacatccagcaactccagtttgtaaatgagcttattcatttgaactgggatccatagctttactcaagaatgaacagcttggttcatctctccttgaaaattgctgttagaattaaactccttagtcaatcttttaactcaactgtttcaaaactcctttggttttgaatcaataaaagcattgaggatgtggcagttgagcagatgggtggtccacttggtaaagctttgttatctccatgtaagccacaataaaactctgacctgacaaaaagaaagtgtttacacaaatcaaaacagaaacctctatactataagttacacagtgtttccagttggtatctacaagtattaatgcagacacagtgacaggtttcaaataaacttgatagaaaaggccattcatattttatcatgttgggttgatggacttacaattgagaacaatgttttactcaagcttagtgaaaactcctaggtagtaatcaatattctcagtcaccattgcattgaaaatatgttcttgtctatgtcgacaaaggcatcaaattaaacttgcaaaggtagattattttttatcttttctcctgatgtaacaaatacatattataactgaaattgcaatataataaattaaaaaataaatgctattcagatttgaaagaaaataacgggacatctaatccatggctctattaatgctttatattttgtggcttaaaaccatctttctaaatattaaatataaattctgctaaaatagtgagggggacatagttgaaacttactatacatcaaactacgagtttccaatctttaagcaaaaatatagttactaaaatgttgtttacaaattatttttaaaattttaatactgacatgcaattaaatgatccaaaggcttcatacatttaccacatgttaaatgaagaacacgcttttgaagaaatctgaggtttcataaactgttatttactgagtttgttttgcatccaagatctcaggaggatttaatctttcatctgtttttcaaagcctcagttacattttattttttattttttgaatttatttatttatttatttattttttgagacagagtctctctctgtcaccaggctggagtagagtggtgcgatctcagctcactgcaacctccgcctcctgggttcaagcaattctcctgcctcagcctcctgagtagctggaactacaggcatgcaccaccatgctgggctaatttgtgtatttttagtagagacggggttttgccatgttggccaggatggatttgatctcttgacctcgtccatgtcagcctctgaaagagctgggattgcaggcatgaaccatggtggatggcctgaaatatttaattgacataacgattatacatatttaaggggtaaaagaagatttgatatacatatataattatcacaatcaaagtaattaatgcatctatcctgcattaattaatccaggctgtacattagacctctagaacttgttcatcttataactgaaagtttgtacccttgaaccaacatctcctcatttactccacaccctatcccctgacaaccactattctcctctttgtttttgtgactgaacttttagattccacatatatgtgagattatacactatttgtccttctgtgtctggctcattttacttagcctaatgtattagtctattctcacactgctataaagatactacctgagactgggtaatttataaagggaagagctttaattggctcacagatctgtgtggctggggagacctcaggaaacttacaatcatggtagaaggcagaagacaaaaaggaatcaaagcacgtattacatggcagcagacaaaagagaagagtgaagcaagcgggaactgccaaacacttttaaaacatcagctctcctgagaacgcactcactacaatgagaaaagcatgggggataccgtcttcacgatccaactacaattcaagatgaaatttgggtggggacacagagccaaaccatatcacctaatgtcctccagtttcatccatgttgtcacatatggcagtgtttccttcttttttaaggctgaataatattctattcaatacagcacattttctttgtccattcatctgtgactgacacttaggttgtttctattacatatcttggctcttgtgaataatgtggcaatagacatgggagagtagatatctctttgacatactattttatttccttttgatatatacccagaagtgggattgccagatcacgtgatagttctattttaaggtttttgaggaagctccatgatattttccatagtggctgtacaaatttacattcccactaacagtgtacaagagttcacttttctttacacccttgccaacatttattatcacgtgtctttttgataaccatcccagcaagtatgaggtgatacctcattatggttttaatttgtatttttctgatgattagtgatgctgagcatctcttcatatacctgttggccatttatatgtctttgctggaaaatgtctcttcaggtccttggcccatttttgaatcaggttatttttaaacattgagttgtgtgagatctttatatgatttggacattaactcctcatcagatataaggtttgcaaatattttcttccatatcatagattgcctttttattttgttaattgatttttgtttttgtttgtgatttttgctgtgtggatactttttagttttatatagtcctgcttgtttatttgcgcttttgttgcaagacacaaaatcaacatacaaatcagttgcatttttatacactgaaaacaaaccaactgaaacagaaaataagaaaatgatcccatttataatagatagcattaaaagaacaagagacttaggaatacatttatccaagaaggtgaagatctgtacactgaaaactatcagacatttatgaaagaaattgaagaaggcacagataaatgaaaagatagcccatatacatggattggaagaatcaatattatttaaatgtacatataaaccacagcgatctacaaattcaaactagtcatcaaaattccaatggcgtttttcacggaaatgccgtttcacagaaatgccacagaaaagacaatcctaaagttttaatgaaaccacaagactgcaaacagccaaaacgctcctgggaaataacaaagctggaggcatcacagtccttgctttcaaattatgttacaagactatggtagtaaaacagtatggtctggcataagcacagacacagaaatacaacaaaagagagagcctagaaataaatttacacacacattatcaactaatctttgacatggcaccaaaaatacacaatggggaaaggatagtttcatcaataaatgatgtttgggaaaactggatattcatatgtaaaagaataaaattagactcctgtattatccaatgtaaaaaattaactgaaatggattcaagacttaaatgaaatatctgaaaccataatattcctagaaaaaaacgtagggggaaactttctgacattgatcttggtaatgacttttttaaaagcgtttatcttttctttttctgaagaacaattattgaaaccaccatttcagggtgatctgtaactggtaagcaaaataaaccatgtaaaagaggagaagccttgagtgtagatgaatgtggtttctctagttcaatcataacattaaaatttcataattaaagaaaattagttctattatttctgtatttatgaacaaattggacaaactattatcttccaatctgtaactgtacatgggcttttcagattgattctacctaaagaaaatcaaaacgaaggtttatatattccttcagtaaaatcactcatagtttcccttatttagttagcatggtgtctttataaacagatgacttaaaagtgaacagaaaatggagaacaaaataactcaggatcccaccttagagataaagctctcatgactgttttagcagggttaacaaacgttccctatttcttccataagttaggctgcctgggtccatgacacggcttgatggacagggtgatccctagtcacctgtgcgcagctgctgcttctgccagctgaactgttgactcacagagtctgcaatatttcttttcttacattaaatttaagccatctttacttgctattttaattccacaatttaacaaattataacataaccctaataaaatgtgatatgtagagaaaacaaactttgtcatgaacacctactttaatgatttgtaaagactccaaagtgttatttaagtattatattaaagtattgtggtgtgagaaccataaaattttgaccaaaaaagcaaaaaaaaaaaaatgcaacaaaaattaatagagacagttgactactggtcacactctaaagaaattgttaatattatacacacacatacacatacacatgtaatttattttttaaatactatgctgcagtgatccaattataccttatttgaaaaaaggaaaaaagtcttatataaaaacattgatgaattaatgaaaatgtatatgtctaaaacaaagatatataatttaaaataattttcatcttttatcaaatattttgatttactatcagtcttgatcatattatttccatgacagtaattatttgctatattcactctaaattcactgtctttattacatctctttgtaattattaatgaaaatattccacttttaaatacctatgtttcccaggggttgctttgtgtaaaaaatattagcatgctacaaactatgagctatccacagtaaaaaaaaaaaaaaaaaactcaaaagaaaatctaattgctattttattcatttgattttataacctcaaactcacagaatactgaagaataaacttttctcctgattcatttgcaagtaagtgggcaagtttccatccatcatctccaaatacttttgtgtctgttttctacaagcaagaacattattctacatatccagattacatccatcaaaatcaggaaattaacattatttcactagttctttctaatcctcagattccatttgagtttcaccagttgtcccaagagtattctttttttttttttttttttttgagaagaagtcttgctctgtcactcaggctggagtgcagtggcgcgatctcggctcactgcaagctccgcctcccaggttcacaccattctcctgcctcagcctccagagtagctgggactacaggcgcctgacaccatgcccagctaattgtttttgtatgtttagtagagacagggtttcaccgtgttagccaggatggtctcgatctcctgacctcttgatgtgcccgcctcagcctcccaaagtgctgggattacaggcatgagccaccgcgcccggcccagagtattctttatagcaaaacgatgcagttcagagtcacatgttgcagcgagtttcattgatccttaatttccctcagcctgggagattgctgtctttccttgacactcaagactgaaattttatcgatgaggccgtttgttttgcagacttggtcttcatttgggtttctctcatggttagtttcaagttttgcatctttggcaggaatatcacaggagtgatcctgtttcatactcatcatgccaagggctgcacagtttcaagccatcccattattgtgattatttgatgcagacgctttgatggttaatgttatgtgaactgagctaggacacagggtgcccagacatttagccagacattatattctgggtgcttttgtgagggtgtttcctgatgaattggcagactgagtaaagcagaaggggctccccattgtggaagagcctcatccaatcagttgaaggcctgattagaacaaaaagactgactcttccccgagtgagagagaattcttgcttgctggccttgacttagacattgtttttttttcctgtctttggactcaaactagtattaaactataggctttcctgggtctccagctttccagctcacctggaagatccttagacttgcgaggttctgtgattacctgagacaattccttacaatgaacctttttatagagatggagtttttggtgtgtgtgtgtgtgtgtgtgtgtgtgtgtgtgtgtatttacatatacacatacacgtgtatcctatttgttctatttctctgaagaaccctgactaatacaggtgttgtgtaccagacttccccactatgagaatgccttttcccttggcaattagtatttttgtggaggtactttgaaatataaatgccttctcctaatcagatctcacatttatttctttatgtacttatatcggtatggattaaaagtgtcctattttatttaaggtgtaataatccattctcgcttctattttttcacactgaagcccacattgttccagatttaacccatgggagccccttccagcaggtgtctgtgtcctttcattatggtgctatcatttcgtgagtgtcttcctgctttctggcagtaaatgttgttccaaaatcatcttgtattttcccaacttggaatataataagcccattcttcaaggtcctcccagtagatgcccgagggactacatgcacatctgtgtgtagatgaataacatacttattcacaacaatacttaatttgctacttttaaatatgaaagaccgtgaattcacacaagtacttccaatgccaacccaatgtcatagggttcattccagtcttcctctttgacataatttgactctcttttccaactggaaaaatcctggctcccattgtctttgatatacttatttatatacttaacccccagttataagcaatttcttgtcactactgctgccatctctccatgtctggataccctccaaacctaactcaggcactgacctccccactgcaggaaactccccctactgcagggacgctgtcttcactaacacttcatatcaagccattctcacttgagaaagcctcttcacctgctcagactctgatacgctgtgtgggctgcccccattccttggttgccctaaaccccactggctctctgattttccatgcctggctaattctctatataactgtgcctattctgctgtgtgtcacctactgagttttcatttcaacaattacattttattttaagcttgtttttttttttttaacagtctatcctcctttaaacatttcatgtacttaatagtctgtatctgatcattccaatttcactggagtctgtaaattttgtttattgtttgtactcactctcacttgtcgtattccttcaatttttttttctttttggttggttttttttttcttttttaaatcttaacctgtaaaaatcccaattgtctaaattgagagtgctttctctagaaagaaatttctattttattctgctcggagctgggggcactgccaacaatctagtcaactcctgtatgacttattttgatttgatagcagaaacctgggactcaccttagagttctcctatccccttatctcccacatccaattactcaattcatccaactccacttcctaaaatcctcccatccagtaacctaaagcaaccctctattgctcaccttccacaatgctaaagactgatgtaaaaataaaccttaccctgtgattgccatgcccaaaattcttaaaaggctttaggtaaaatttataccctttggattgtcaaaaacatgatgacttaatcttttcttgtctgcgtatctagccacctatcatgccacttcctttagccttcacctcctcttttttttttttttttttttttttttttttttttttgacagtgtcttgctctgttgcccaggctggagcacagtggtgcaatctcagctcaccgcaacctcagactcccaggttcaagcaattctcgtgcctcagcctcccaagtagctgggactacaggcacatgccaccacaccaggctatttattatttattttattttaagtagagatgaggttttgccatgttaggcagtctggtctggaactcctgacctcaggtaattcacctgccttggcctcccaaagtgttgggattacaggtgtgagccactgtgcctagcctagccttcacctcttgaattgtactctggcaataacagactctgttgttttccaaatgtgccaccatatttctgcacatgcccagggtaacctgtcttctctaactagttcaagtgctggctccactttgaagagtgtatcttatctacaactccatgcagctcatttcactttgcgttatgaatgcttatttgaatgcctgtgtttataatgaagtgcaatttctttaaggtcaggggtcatgtctattcacttgtgcatttccagtttctattaaagattaacatggaataaattctcaagaataatggctgaatccacttccagcatgcaataagcaattactgctggcatttgtacaagtacacagtggtggaaattcagtcatatgtacatttctatcaactattactaaagcagaagtattatgaaacagttaaaaaatatacatgggttatgattatccctgttcattgaaacagtcctggaaaaacattttttatcaggttgtaaacactcactttaaaaattaataaaaagttaatataaagtctagaaatttaaattccatgggatagtgctaatgacaaaatagtagtagaccctaaattgtgaatttcaattttgaatttcaaattttgttttgtgttttatttttttgagacggagtctcgctctgtcgcccaggctggagtgcagtggcgcgatctcggctcactacaagctccgcctcccgggttcacgccattctcctgcctcggcctcccgagtagctgggactacaggcgcccgccaccacgcccggctaattttttgtagtttttagtagggatggggtttcaccgtgttggccaggatggtctccatctcctgacctcgtgatccgcccacctcggcctcccaaagtgctgagattacaggcgtgagccaccgtgcccggcctcaaattttgaatttcaaaatttagggtctactactatgattgtcacgagatatagtccaaatttcattcctacaaatatgtgtgcagacacacacacacacacacacacacagattttatctggatatcctctagttgctttaattctttctaaatagtcatctaaatcctgatgaagcaggagataggtttagtgatggtttcaatggaatgctatcgaaaattttcattttgtttttttttcacatcagaatcaataaatgttagccaactctcctgcttaatcgtcccattgagaatatattttatttcttagtgtctgtgcctaatatagcctgtttatatgaccacactagaagcttgagatctagtcctacttattatttcttcatttagatgtatttccagtaaacgtaattaaattcaagctctcagatatttctttcattaaccatttattctccctttctgttatcagatacagattcagcaattaatttcctgattaataacaattgctatgaaagcatcattcagtccactaagttgctgtgtttctagaagatttgattcaaaggtttgttcttatttctggcttcaatatccattgttaagtcttgccctagggtagaccacaagagatttagagcaactaaactatactaaattggttataattcaatgtagtttaatatacaaggaaatggataatctatttaccatccaactcaaaagaagaaagaaaaagagagtgagagtgcaggtcattttataggaaaggaatgtttttaagaacctatcaaagattctctcagtcagtagatagatggtatgcaaaactctgcttgataaaaacattgcaaaagtgtttttgtactttttttgagtttacatctcaaaacctgctcactttcgggtgtggtggcttacgcctataatctcagcactttgggaggctgaggtgggtggatcacaaggtcaggagttcgagaccagcctgaccaacatggtgaaatcccgtctctactaaaaaaaaaatacaaaattagctgggtgtgttgccggtcacctgcaataccagctactcaggaggctgaggcaggagaatcacttgaacccaggagacgggggttgcagtgagctgagattgcgccactgcactccagcctgggcaatagagcgagactccgtttccaaaaaaaaaaaaaaaaaggacactttattggtacgcattcatgactgtgcatacatacttaaagttaataaccactctaatgggcatagaaactttctgaaaataatgactatattatgaaggacaaatacagtacagtttaaggaatcttgcttaataaatatttaagggtttcattgccatttctagaagttaaacagaacaaaacacattgtaaattctaaactattcctgcaacatgattttccatgaatctacaacataccgtattcattttatagatatcatcatcctcttttcagtaattgaaagtattttccacaatactgagtcaagtggcgatatgaatatgacaggtgtgagctccaagtcgtaatgcatctttttcatatataatattttttatttcaaagtttttggggtacaagtggcttttggtaacatggatgaattatacagcagtgaattatgagattttggtgtatccatcctgcaagtagtgtacattatttcatctttgccacttcctagccaagtgattttggaaaagctgataaactttttatgcctcatttttttaatccatagaacgaggacaaccatagtatttagcctggcaacatagcaagatgccgtctctacaaaaaaaacatgaaaaacaaatcagctgagtgtcatggcatgcgcctctcgttcctgctactcaggggcctgaggcaggaggatagcttgaaccctggagagttcaaggctgcagtgagctatgattgtgccaccgcactccagcttgggtgatagatggagaccctgtctctaataaaaagaaaatgcatagtatttattttataatgtcgtggcaatgagcaaatacaggtaaaccagtcacagtaaaatctcaataaacaaggtgattagctcactacacatctacataaaacataataaaacaaaacaactttatttcctattttccttcccaagctccaggcgtttcacttccaattttggagtgaacaattaagttaattacttactgtgatttcacattacctacgtttgactcagctgtctatctccatagcctctgtggtgttcgagttccctcagtgtgtcacctttctcattgtcttaggagttttcactgcaggagactctgcagttacggagcccacagcactgagtaggtctcagccaatgtttggtttggccagcagcagagtactgacatcatgtttattatcccaacctcactttgtttaattacatatttgtaaaagaaaacaaatactgaagatatatataaaaattctgtgtcgaagggcattatttctacattatgactcctttcatttaaacatacagacatttggtaccaaaaagaaaatatatttgagccttttggattcatttatttgggggtgaggtgggacacttttatttcagtgtcatctgttttctcgattttgtaaaactaaatggttccatgtttatttgtatggttgaataaacatcataatgcaggtgcaatgcccagtttcaggcagtagagcatctgtacttaaaagaccatcagatttgtattaagctgttgaaatttgactgcatagttaggatcagacgttgcttcaaggtacaagaatgaagcaagtcaatctttaacaacgtttctctctgtcatggaggcagctactgtctttaagagcaaggacaaacacaattttcactttgttagaattctgggtcattctccctgagctctttatatcaaagcaatggcatctctggtcctagatacaagctctaattgtttctccttttagaaaatcatttttctctgccgggcgcggtgcctcttgcctgtaatgccagcactttgggaggctgaggcaggtggatcagttgaggtcaggagttccagaccagcctggccaagatggtgaaacctcatctctactaaaaatacaaaaattacctgggcgtggttgcatgcgcctgtaatcccagctactcaggaggctaaggcaggagaatctcttgaacccaggaggtggagcttgaagtgagccgagatcgtgccattgcactccagcctgggtgacagagcaagactccgtctcaaaaaaaggaaaaaaaaaaaaaaaaaaaagaaattgttttgctcttttcttccctattcttaggcttctgaactttttttgttgttgttgctctctatccttgcaactcctcatttcaatgttgaaacaactgagaggtgaagtcttcgtaaatataatctagaattgctagataaaataagaggcccagttaaatttgagtttcagataacaaatgatgttttagtgtaagtatggcccatgcaattcaaatttgacttggtgtactgtgtttttatttgctaaatctggcaagcctaatctcatatctagttattgaaacacgtttataaagcagaatgatgtataaaaaaatctgagttcaaatatgttcacttttatttcttcgcaccatgcaaaactgccgactgtcctcttggatttgaatttccttcttttcctgattttttcatcgctttgtaaatgtttttctttgactttctctcctccttacaatgcaatcgactttatcattgtttcttcagtgtcctgattcttttattctacctcaacatctttatttccccattcattcttctttgtgaaaaaagaattccaaaatgcttattacctcagtattttctctgacacaagtttgttaagaaatactcaaatttttaatacaggtctttgttctactgaaaaacatttcctttgccaagtttagactacattaaggacaaatatcattgctgtagtccatgcacccagaactctgtaataaatagtagtacccgcttcttctttacatgtgtccagttctgtaacttctatttgggaatttttgtttaattataatccatgtgtatattccttgaaatctgtggtagtatgacagaaaacgagtcttcatttggctggtagattctctagcctttcccttttcagattattttgcatcttattgccagctttttaaaaactggtaccccgatcgttttgctgcctgtacctcaaagttttccttatcgctcttttgatcaaatataaactttaaattcttccatttattatttcttctttgactcgcaatataccccattctaatttggaactatttaaaaataaggctgctaactagaagtctctgcacatttctctacccatcccaaaagtttggtccactctaccttcctcctaagtaaaaagttaacaattctcctttccttaccattaactttttaaaatcacttatgagacactgactttgatcaacccattgatcttttttcaggctaccattcttatgtactttaacatgttttgatgaatttgtggtcattataagtattgaatgttgtattccacactatgctttgcatttttttttttttttttttttttttttttgagagggagtcttgttctgtcgccaggctggagtgcagtggtgcgatcctagctcactgcaacctccgtctcctggtttcaagtgattcccgtgcctcagcctcccaagagctgggactacaggggcccaccaccacgcccggctaatttttttgtattttggtagagatggggtttcaccatgttggccaggctggtctcgatctcctgacctcatgatccacctgccctggactcccaaagtgttgggattacaggtgtgagccaccgcacccggcctgctttgcttttttaaatgttgcaaattagaattcttttggttatcttatctaattttctatttttatgttatgtgtcagatagtctggacttacaggaagacctgtcctcttccagcacgcacccttcctcctcccccatcattcccaattcacatgactttctaactttctaattgggtgctttttaatattcatgagcacaggttttaggtcacacagctttttataattatgggaaaagtaaaggtaaatagtgggtgggtactcaaggagctcacctacaaatcaacttgattcaatctatttaatctattgcttatgttctgatttttcatcagtgtcctggtcattgcttaacaatgcaaaatttgtggataaaaatattcatgttaggtgaagctcactgactagcctacaaatcagtgtcaccaattttgatacattttatccacatctccattatctggttaacatatcattttgcaaaatattaaaagatcttcaggtcacaaagggctgtcatgaacaaagtttcttctttttttaaataaactgaacagtgttactatctagttggcaccaaggacacactaaaattgtaatttataattatggggtttttcctcacagaaataaaaataaataggtcttattgaagacatagacagttttgcttctgtgaagatttctcctttacacataatcagtctgacttttctcactcgtttctgcctgaggtggaggtggggactccattcttgacttaataaatctaaattcttcaactgtcattctctcccaagacacttcaccctttggggactatgctgcattttcccattcttgctctttgtacatttcatcctgggtctggcaagacctatttcaaatatacaaagttatctgatacacacaggaacccaacctactctccacagagtgtggaagggttaaagaaaagccacttctgaacatctccgctttatcagctcccgttgggagatcaggggccagcagccttcattagccaataaaaagaaaatgacgtttctttgcaaggagtagactttactaagcaccctatatgttaaaaaaatatatattaaatgttagtttttgtctccaaaatagatatataattctcagatttccttgtaattttctcttaatggctgattaaatcttgacaatataaagcagtccagtcatccacccattcactggacaaatatttcttccatgtaaatgccaggcaccagtttaggtcctgatgatacaccaatgaacaagaaagatgaagtgatgatccaccaggaacttacattttagtgggagagatacacataacaaataggtagatgatatgataagcagggtaagtagatggagagcagatttttaagacttctgtgagctaagacctgattgaagagaggttgtaattttgtggtgtcagcatgatcaggccaagtaatcacttcctattgcccatatattttttaatcatttgtttaaaaatataatgcaaagagatagttctcagactgttttctcatatagaagatacttatttcttagattcttagtactactcattttaataagctatatgagtccacaacattaaaaaatttactctagaaagtaaagctgggtaaagtgacctcagtgtagaaaacttttattatatggccacaaaaggcactgaaaacgaaatttctagagggccttaggggattaaaagggaaatgtttagaagacattaaacctctggaggtttaattttgcaacttccccaaatacttagacgacttcaaaaataattttgcttttgtctaaactcagaaattatattgttcttttttgcccttgctggccctcagaagagtattaattctcattttgggaaggaattattttaatcatgccattaaatgagaggaaaatatcccttttctaaaaaaataaaaaattaaaaataaaaacctcggtgtaaagtggaattctctagagaatgcattgtgcacaaaatgaccttcctcagtgtattactgggatggagggagtcgtctctctgtggggtagcaaataagccctgtggccccctcaatccacctcagcctccacagagcatcagttgctgtttcatcccgggttggtccagacagccactgccagtccactagagggagcacttgagaggaaacccatttgctttcattgatctagatctcaaataaaatttcatcttagaggctgggcgcggtggctcatgcctgtaatcttagcacgtcgggaggccaaggtgggtggagcacgaggtcaggagttcaagaccagcctggccaacctggttgaaacccccatctctactaaaaatacaaaagttagcgtggcatgttggcagtaagctgagatcatgccactgcactccagcctaggcaaaagagtaagactctgtctcaaaaaaaaaaaaaaaaaaaaaaaatttcattgtagaataaaatccaattcctttcagcttttatcttcaaattttggtcattgtttgcattagtcattgttcttcaggaaaacagaaccaataggatatatgtatctgtgtgtgtgtatacacatatatatgcacacatgtatatatttatatatacaaatatatgcatgcatatatatttacatatacacatatttacaattctgtaaaatcttatatataaataagactcacacatacacatataacgtgcatatatatatacacatatatatggcatatatatatatacatatatatggcatatatatatatacacacatatatatggcatatatatgagatttattttaaagaagtgactcatgtaattatggcagatagcatatccaaaatttgcaggtgggccagcacgttggaggcccagggaagaaagactactgcaaatcaaatctgaaggcttgtctgctcactaaatatcctcttgcctggggaggtcaacctttggttctgttcaggccttcagctgattggatgaactctcctccctctaccctcacctcaataagaaggatgtcttagtttctccaggcttctataacaaaatagcatgcaacagaaatgtatttctcacagttctagaggctgggcagtccaagctgctggcagattcagtgtctggtgaggtcccatttcttggttagtagagagttgtctttttgctgtgtcctcatacgatggaagaggcaagccaattctctgggcctctaagggcattaattacactcatgagggttctgttctcataatctaatcgcctcccaagagtcctgcctcctaatatcacattagtgactaggcttccacatatgaattttagaggtacgcaaacattcagatcatagcagaaggtgatttgctttactaaaaatcagcaacttaaatgtaaatctcatcctaaaataacctcacagaaatatccagagtgatgtctgaccaccatggcctaaccaagttacaagataaaatcaaacatcatgctgtttctgtatagtgacactaaaaatagttgctaaaaacttgtatgacaaaatagaaaaatgaaagaaaggcaaattattttggaaagttacagtaaagaacataatctaaacccaacaaaaaagtttctgagactcaatcactgaacagagttggaagaagcttttattcacttcattccactgtatttaacaagtctctacttcagtccctgtggggtttctaatattataaaaagtaatatcataggttataaagatttagaaagagtgcttctatttttgaaatcaataatccagctaggacatattttctagatattattataacatttttacattaaagataatttcttgttatttgaattttatttcccctctcctcggggttcttagtaatacaaatgagtaaaattgctttcagtaggatgctagacacattgtactgtttgcaggtctgctaaacaacagaatcaagtcacctccttggcaggtgaccagcattaactataatgcccatcaaaacagtcaataagaatcacagatctgtggcaccatagaataatggcctaattaatctctgttcaatttccatttttatacctgctcccagattcccattatttcttatctatgagttcttttctcatttgaaaacatcttctatggattttccttcattcaatcagttgtttttacattcattcatgtttgcattcaaagatatttactaagaacttagtataggttatacatttatgaatattattcaaacactgaagataaagattgactgattaccacagtggacagagatacattgctgttaaaaaaatctgagtcctttaaaagttttttgtttatcatttgcaagagtatatggaatactgaagtttcttctaataatatcaaaggaatagttaaaatgccatagggactaaatgttacatatgtaaagtaacatagccatctggtctgtttcattcttatttccttaggagaagagtgttaagcatgctctaaaacatttattgagggcacgttttatgcttacgtttaggttcagttttaggtatatagaaattttaaaaggaaaaggaaaaaaatttttaaaaaaaggtataaggggatgataaagaggaggccagaaagaaaagaaaatacagtttctctcctttcaattccttaccattactttaccattcttgtgtggaagtgggagggcgtatccacagaggggtagaaataggcaaataccacataaaagggataattgcaggttggataaccgcacacattggaaccaaaactgcttccgaaaaggttataggatttagatagtgccaaagactaagtctgaaacacatttaaaatagttgtttatttacaaaatttggcacaggtccccgtctattgctacttttctgtcaacagaggtttaaagtttttagcagtgaaagttttatatagttaaaagagactgagacaatctctggaaagcattttattaccatgggattcccttttttgtgtgtggaagtgggagacctcctaattggtgttcaggtacacttcgcagtcttggttgagtgcaaggaggcaagtgagcagcatggagacattcaaagacaggaggattgtcctgggttagggtcagtggtattttctccatccagctattttctgtaacaaaagggtttgatgagttacttttcttgtgaccaaactctcttaatagtcccttatggggccggtggctgtcatggcagtttgtcattagtaaagaagttgagactactctagtttggcaaacaatatgaataaagtgacaaggtgatgatgagcatgcccatagtcttgctatttaaacaatgattattaggccactccagtgaaagataatgagaaatagaacttctgcttacagaagatgaattttgaatgcctaaggtttaaatttagatttgatgggatagaactttgcatattatttacatggttttgaaaacaggcatgaagagagaacaaggttgtaaggagcttaggacagaagagaccaagctgtcttataattgagtcaggacgaagcacaggaatgttactttgaatcaatgctggccttaatggtccactgatctatgggagaagaaaaaaaacttgatatttaagcattggtggaaaacacacacacacatacaaaatttctgaataccagagactgagggaaatttgtacccaacctaattagttgaaaatacaaagcaagtttcatcaatatagcttgtatagggttaagaaaaatacttaagcattacatgattgctgtaggagcccattttttggaaaatttccagggactctttgagtcaacttgttaaaaacagaagaaaggctaggaaagaaatagcttgttttatgcctgtgattataggatttcatcattatgtgggccactgagtgttattttctcaagttcatgcatatgcagagatttaaactaaatttgtgttctactcaccacgttaagaggcacaagttatcaaagttactaccaatacattctattcccccgaaagacattcaaaccataattctctcaagttaaaaaaattaatattttgtaaagtaaccattgtccctcttctcaatataatccaagtgctaacacctttgaacacaccaacaatggtctcttgattaaaaagaaaccacattaggaaagtcctttgaataacataaattgtctcctataataaaggaagacattggaggtaaaaaaaaaaaaaaaaaaaaaggtttcagcaccaatcttcaatctctctctcacaccacagaagattcagagctggagttgggaaatgcagtggacttgggtaaactgaggttttcagtcttcatactagtcagaggtcataattgattgagtccagttgtgatataactttgggcagtaattttagtcaattgcttcctaccaaagttccgtgctctttgctggaggctccgtttctgaaaagctctccctctgcccttctttctttttctctgcacacacaaccctcacgcagctttcatgctgcctaaatcagcctgtggattaggtattttctcattatccagattaaaagacagctcagtctcacagagatgtaactgactatttgattgaaactgacttttttccccattggaggcacatcagaatcacctggaaactttaaaaattctaataccagaccatagccttccaattctgattgcgtggatctgaatggggtagttccctggtcttactcttcacaagctccccatgtgatgttaacatcagccagcagaggctgcgaacacccataaaaacaaatccagatatgttaatagatgttagggaaagtgggagaagagggggtggtggatttgcaaatgttaaacttgttacccaaataacctctccaagtaaaacttttggaaggatagttttgatcaagagaacctgcccctttttggatctctttcacctgcaaggagaaaaaaagtgagaaaaggaatcagctttttataataaaaaaaatgcagatggagattccgaagtggctcttcagcgtgaggatcgaatttttacagggaaattccctctgaaatccttctagaaattcctgctatatcatctcccacttacataatcattgccccttatccactaagcaccccccacccccccatctgacagtcttgtcaacctcatgtgtctggattctcagtcttagtacagtccctctttcgggggagggagagctttggagtttggaggagaaggaggaaaagtgtgtgtctggcctgaaggtgatgatctaaaagaagtttccactgaagaaacacatctgggtgtttcacaatgtggctccttgtatcatctacatcacttggaaacttgttagtaatgcagattctcagacctcaccctggacttacaaaatcagcaatgaggggctccggctgagcagtctgtccgagcaagtcctccaggtgattctggtgaattccagtgcaggctaaagtttgagaactactggctatctcatgttttctcttgagcttctcttaccaaccttgggttgctttgttcctgtttgttttatagagcttttctttatagagcacccttggcataagtagctccatcttagaaaaagactccatcttacattttaaaagccatcatgccaacagggaccaggtgttcggctaaccaatagagactgcacccaaccagataaggacataatcattcacaccctttcactattagtcctcgctagaggactctgtggccataaaaaagagcaggatttcaccaattggaaactgctgtcttagcagacaccatctttctgtcccttgtgataagtacccagcatcccctgccgaagactctgcccacattaaaatctcttccttgcaagaccctgatggaccacctggatcaggacgaggcattgtttggtccacattgctctctctgaactggtttgttaacccttttttcctatctcctttatcttgatgttaaatgttactttgttgtggaatgtttagtcaaaacagataggtaggtaggtaggtaggtaggtaggttatgtgtggtttgcaatattgtctgacctgtggagtgacttgagcttgtgtgcctatggctctgccaagtgaatgggtagcactaaagagaattacctcctctggagcttcaggtagctcatggctttgatgattgaaatagcattggtgaaagtctgacattatggaaagacacaaatatttgtggacttggtcatgtctgactgtgcactgctcatgataccttcctattacttcgcctagagcctgaatgggaaagggagaggcaagcaactgaccaactagcaaacaaataaaatgaacctactgtgaacagaaaaactatttctgcccatagtagtggcttattgcagatacttatcttcagtttaaagttatctttgagtctctatgtttgtagctggaaagatgcagatgttttaaatcaagaaagttggacaagtttgttcctaatattccttccaagtttaattcaatggatatatgagtttggggattaataaaaaaaaacagcaaggagtaagaatctttgggaatataggaaaaagtgctgtattcaactgggaaatatctacatatttaaagacaacttctcagagaagatgattataagcccacattatgttttatttcaaacgtgctgttggatgaaaagttgctgaataagctgaattcaagattctcccctaggtagaaacatttgggtgaggggtggtggggagaggtcatacaatgaagaattgtctggttaaagattaggctacttgtaagatggattaaagatgtaggcaagtttcaaaactgatagtcagctgagtggatcttcccagaaaggatctttaagtatcatgagagtttatcagaaaattgctcaagtgttttattaggaattctaattattttcaggaagggctgtgaattacatcttgcaaaaaagctctgtctcccaacaggtttggtgacatttattttttctcagtttctagtctcatctcttctcacattttatcttttgttcacttttagtaagtaattttaacttcctggatttcaattgcttcctctataaagcagggataataatttcataccataatgaaataataaggctagaaaaataatttttcttttagactgttccaagttttgtaactgactaatctaaattatgcattggggggaaggtgatatgagatgtgcttttcagtccttggattcgatactaattataataccaaactcatggtagattgatttattctgtcacatatctatcaaacatttgcagtttctgctgttatgtatgctttatgcattttacaaaaaatcatcccaattacacaattactctatgatgtaggtacaagaattatccccattttatagatgataaacctgagacactgaaagtttaaatagctagcttacactcaacagtgtggtatgtggtttgtggcagaggctggatctgaactcaggaagcctgcctcttgtgttcaacaaacaattcactagttgatatcctgtcattccacttgattctccaaaaataaggttgggccttgtcaaggatcaaatgaagactggtaatcctaaagaagttgaacttcagagagcctcagtgggagagaataacatgcctagtccaggtcgttaaaacttagattattttcttacatagtattggctactgcccgttctgatgcttgtacatttctgttacggtcctcggtctctggattgaaccttatccactagattggagcataggcactgtgattcaccatgttattctggaatctaatatagaaaatgacccagaagcaccatttttaacaaacctgggttccctagccacgtagaagcatcagccagatccagctggagccaatcctgctgattagcttaacaggttctctgttttttttttttttttttttagaaaaagataaaatgttacaagatagaacatcgtcttattgcttcttttgttttattgcccctgccattttcttagagcattaaaaagaaatcactttctcagatggtatgaggatgaaaggatccacattgggaacaggaaaccaaagatctctgaagattttgaaagcagagaaagaataaccaggtgtacataatgataactaggaaatacaaaaccgctgtgagcaaaactgtttcttccagtttgggaggctccaaagtgaatcccgtgatcttagacacagagatcaggttaaaagagcctttcttccaggcagcctgctgctgcatgatgctcatcattccacatcctgaacaatcctcaggcttcaggctggacgagtggtctctaggtaccactgtgtacttaagagtgccattttctgagtgcatcttctgtgccaagcactgtgctgacatagtatcttattggcaactcttaatcttctatggcatcagtcttattcctattttagtgacaagggccctcttttgtaagtaacttcctccagccccacagtaagtgcgaaaaatgggattcattcctctgactctttgaatccaacccagtgcttgggtgtcttcaagtatctctgaattcctgacctctgggattcagtgatttttatggcattcatgtgatttctgtggtgagttccctccacccccaactccacagggcctgtctgtgaaaatgaaagataccagtcagggtgcaagacacagtctgttctcatggagtcagtgaaaacttcattgtatttgaaagaccctctgatcaccagaaggtcattcttgctcgccttttccttgactataaggttctataagttttttcgtaatgccacttacaataatacagtatttacaattacatcagaatgacaaaaacacagtttacaggagttagcacctccaaagcatgacaataataggaaaaatgtatcaccaagtactagtataaaaataaaattctctataaccaataatgttgaatcagagagccattttgaactaaagaagtttttgattcccttgtgttaactttaaacaaacttttttggttgattttttttttctattcattccttctgtataagaaataatggagaaatgtgttaaacttttagttaaatgtgtgtcaaagtttaatataaccatatggtttttcctagttttggttatatatgggaaataacatttgattcactcgaataactttacagttgaccgggcttgcttatgttggtgaatgtatttaagctcattcaaaacatacagcttgacatcttagaatctgaggaatgactttaggcaacagttaagccaatttttaaaattctcattgggggcactgaattgaaacgctgtaatcttctctagaactatcttctatttcgtgtttcagcaaagacttaattgttctttgaagaatttcttactctaaaaatcgtagcaatttatattccaaagaaatacaattatcttgctcagaaaagagaagaaatgtagaattgcctttatttctaagttataattgcaatcatgtattggcagcacatgtgaacaacttagatataaaattatgatggggaaaaaacctgcagcaagaagcaaagtgtgcatagataatgatcctctgccaagtaaaatgagttctatttatgtatttgtttaggcatattaagtgtctagagcagcagtaatgtgaactttacctttttggttgtttacctttttcaacacctatcaatgctgtattggtaaatattacatacacacacacacacaaacacacacagtcttgctctatccccaaggctgaagtgcagtagtggaatctcaactcactgcaacctccacctccagggttcaagcaaacttcccacctcagcctcccaattagatgggactacaggtgcatgccactacggctgactaatttctgtatttttggtagagacagggtttcaccatgttgaccaggctggtctcgaactcctgacctcgagtgatctgcccgccttggcctcccaaagtgctgggattacaggtgtgagccaccatgcccggccaaatattatatgttgtacgcattgggtactatgtattttaaagtcaattatgtttaactttgctcttattctataattttgcacctctggaggtaaagttaccatgccatataaaaaaaatggagataaaagtaatacattttacgataaaaccactcttccttttgtttttatataaataataggtagaggtctctgtacatattttatttctatgtttgtttgtttatttgtttatttattgagccttcgtcacccaggctggagtacagtagtgcaatctccagctcactgcaacctctgctttctgggttcaagggattctcattcctcagccaccagaatagctaagattacaggtgcacaccaccctgcccagctaactttttttgtatttttagtagagacaggatttcactacattggccaggctggtctcgaactcctcacctcaaggaatccccctgccttggcctcctgaagtgctgggattacaggtgtaagccaccacagctagcccatattttagtaaggaaaatgatgggtggcatgggactttgaaaactaagacgatatacttagtgttttaaaataagattttgttactgatataaaccacattgaagtgaggaagactgggtcatagtccagcaaagattgcaccttattttcttaacacgctaaagtgacaggccctatggttggtggggaagaaaggccttgtgacctagagggagaaaatgagatctttcgattcccagagtgagagagaaagatggacactgtctttagattataaaattcaaaaagcctaccgaaggggtgttgagagctacacttgaagggggctctgtattcatttagggacatttaacattacagctttctgtcatgttagcataggtcactaggtgtaaaaatggcatgataagcaatatgcgggtgttaaatgtaggagcagtatgcaagagtatacaggatagaaaaagccccttgagtccagaaagcaggcttgagtcaagagtgatagcctggactaagtggtattaaagagaataaagaggtagaacaatagaaaatagctcccaaagaaaaactaggcatacttcataaaattacagaagcagggaacaggatgacaaatgtgatctacatttgaaacctgaggactaacatgtgaagttgcctctgaagagatggtaagggaacctgtctgtgtgaggggagtggtggggaacaggacagttaatggacgcattgaacttggtgtcatctgcgtaattcaaagaaaacatgtagtggtgggtggaggaagatttggatataataagttgagtcacaggactgacgttgagtgaaggctccaggaaaaaaaaaatactaggactgacattttactgataatttacaattcttaagggggaaaaagagaaaaaaaatcaagcatagaaacaaaggaataataataggtattaggagaaaaaagaaacacgtggactaagtgagagaattttatgaaagaagggatgctgataggtttttgacaaaacgcttgggcatcaagagaatgaaaaggctttggtttgggggaaaaagtctcattggtggcttttgagaattcagttttagtagagagatggagttgttttaagaggaagtaaatggctaattgtagaagtgagctagggcaatgcccatcaggcagtctcttgaggtccagtgaaacattgaggtttagaaggcaattattgatcacattcagaatcagcttacacagaagtctgttgaacaggaagcaagtctgccaagcagggcaacatcgagtaattcctttcaaagggaatccttgcagcggcccactcagcaatctaatcagataacctaggagcactcctttggggctccaggtaacagctcaggtgcaaggagacgaaatgcacagtgggtgtgtgcaggaccttctgccataatagcctccttctaacaaggggtattcctctcataaacattccttaggcacaaaacacaccaagttacaatacttaccacatgtatggaactccaaaactacggtaccgccatcaggcattcataatttactggtatttctccaattcaagtacaatttattttttaaaatgacgctaggaaattgggagtccacagatcagcatgagcatgaataagggaccctctgtgtgaaggaagttaaggatcttttcacatggagggtgataatgaaaactttaagtgagatgactcactatagaatccaggcttcatgaaaaatatggaacttgggaaaatgtaataggttgagtgactagatcgatagtggaggttcagaggcagatggagagaggcaacagaacagattgcatcgtttcagtattgaacaaagtcttaagtacataatgagtgcaaatatttgtttgattaaaatgagtgcaaatgggagcaccaagttcaacatcttagtgtttagatgggtgacatacaaggatgatgatggtttgctaaagaagtaaataagtacaaataaaaacaatatagagacagagacgttcaaagtaatagatggcaagaaaccacaggaaatgcaaccctgttggtgaaatcactcaatcatcatggaacagtcttgagtaaaaatgaaattggttattaagtgaatttgtttttttattttatttttaaattattttttaattgatgcatagtggtacatattcatagagtacatggtgatatttcaacacatataatgtttggtgatcagatcagagtaattagcatatccagcatctgaaacatttattatttctttgcattaggagcattcaatatcttccttctagcaacttgaaactatataacaataaatatatattaactggactatctccattaatgctctatgtagccatatcagaagtccttagattttttccttcacatttttttttgcttatttacagcacaagcacgtatgattgcagcaccccctaactgttctcccgtacttgaagaaatgtccagtcccctgaatgaactcacctataactgtatgataccctctaaatccagctataaactataataatcagcttataggtgaaaaagagtcgaagatcaggggtgcaaatgaacatcgagatgatccaatgtaaactctgttttgttgatgcggaaactgaggcctggagagttaagtgacctcctaaacttgcagttcttggtaacagttgtgaacatgaattccacgtctagtgctctagactaacccatgctgtcttcaataattccagtgaaaaagcatagcagtttagtcctcccaacaccaatgcatgttcccacattcccttttctcaatctggattgttttttcctggatgagtcatatgtttctttatcaaattctaaagcttcagagtgaaagcagaggcacagccatcctatatgaataaagcagatggaagtatgggatggtttcatatggaagtctacaggtacaagtcacataactatattttaagtcagcatcttgtaatagcttccttccagtgtgcgttatgggttgtagcatgttgtggtcagaagacatgtatttaagtctgttctctctagtttatcaggtacctggctgtaggcatattcacttaacttctctgggtatcagttgaaagatcattatatctaactgtcagaatagttttgaggatgacataaggttaaaatgtataaaatcatgagacattttcctcagtacatttgttttctctttttacttttcctccaattctgctatcaaagctctggaatgtattaccaatacatctgtcatctgttaatattaatgggtcttctgtttccttaaaatacctcgataatgtataaataggaaaaatattactttatatgacaatgacatcaagaaaaagggagaaaaataagatctgagttttctaaaagaaaaatattaaataaacaatatttttaagatatatgaattcttcagagaagacaatgtttacacagggtgaaattcaaacgtaattttctgctgaacaactgtatatggaggacatttatggcaaatacaaagcagtgtttatatcatttgcatgtgtgtgtttctttgttcttaaaaaggtttcagtgaaagacaagagcatcgtcttaaaagtgaatctcaaaggttgaggctgttttgttcaaaggagtagacttcctgaggtttatgacaaatcaatgcgagggtcaaatttaaaacacctagagaagtagagaatgctgtattctttatattatccaaactattcaattaggtttttggaaaaagattgataacataaattctaggttatataggttatctccctaaatctgaataaaattctgagagtgtttagtgcttatagctgtaactgagtacattttccactatccctccctccccacaaaaggatagattggtcattgggtcagtcttgttggagacgactggcaagtcaaatggttttggaaagtaaagtggatttccgaacagaaaatgtttttccgcggaaactatggaagagatcaaggacgaaggcaaactaaaccttgaagatgaggaacggtagtgagccatatctaacaaaagctttactattcatggcttcctagtttgcaacttaacgtgaagtttgttcacatagatctgagaaaataatacctaattattgtgaaagaggacttaagagggattctttagcatggttcaggtggggctttaataagtaaaggcaaaaatatttttgtttcaggtctctaagatacatttcatgtaaaagtccataatataaaatgcaagcctatacctctgagtcaaagattcaaaagcacttttaatattatggggaaaaatttttttaaaaagccttgtagattatcttcaagggtttgaaattaattccaagcattcattagaggacaggaaaagtctgaaaatattatagtatgcatgagatgacaaatggaaattaaatgtgtactatccacactataatatttcagagaatatgaaaattaatagtgataccacagaacctgtataatttttttcctccgtgattttgtagggaatatggaattctgtgagaagaccttgtagttctcatattgtacaatgttctttgaaagcaggtgcgtatgccttgagttgtggtctcctaattatttagttgagaggtgtaaccaatggactcacctgtgtgaaaggatattggctctttatggacgcggaaattcaatgatagtgattctcaaaatgtggttcctggaccagctgcatcagtattactttacaacttgccaaaaggtaaatacttggcactcactccagaacaactgaattagaagctccaacaatcagcgttataatatgttttccagagaattccattgcagctaagttttaaaaactgtagtctctggcaaaatccgaggcacaaccagacacatctctgtccacattttacagtctctggcaattcatactgaaccacttgtaataaacatgttattcggggttcatcctaatattatgcttctagcttttgaatgatttattaaaaatatagctagtaatgcccttctaatttatcagcaatgtatccttttggtcacccattaaatcacatgagaaatgtttaaattcctgttactctggcagtggattgaaatccaggcaccgccaggttaaaggttccttgggtgattccaatgtgcagctacattttgggactacttccttactaagcaaatttctcagcttgattatgcataaaaattaccagttcaccttctgaaaacacaccctctacccccagagattctgatcagaaggtctaagatagttctaggttgttgcatttctaaatagctccacatacaattctatgttgttcagccagtgctggtaccaatatttggaagctctagagagaaaacctctcggtacttgttcttgtcaagtggtaagggatactttaaaaaaaaaaaaacctaccatgaagaacaactcacctattgcaagtttttgatctgtaggtcagagaagtgaccttttaacacaaatattatttgaatggcgttgtcaggttactttcactggggaaaaaaataaaaaatccatgaatattcagtgatacaaatggttagcagaagacaatgctaaaaatgaagggtattatgacagccaactgttttaaaacttcaagtttggagatctttgttacttagaattttgtaatctgaacaattattctgaaagattttgatggatcattagataggcaagcatctgttcaagtaaaactggttatttgctgacaaagcagaagataattaagaatcataattaactataagctagacataagtcaggattataacacttattataaccatgtataatgataaaatttctcattatattcatctaaagatttttgggtgcttaccgtgagccaggcactgtgttaggaggcaagcaaaagttacaaagaatggatgataatcttttgttataaaatgtagactgttgttcttaggaccacaattcaaagaggaagtgtaagacaaaagttcaagaagggcagtggaagtgaatgtggaacatactgaaggattttacaacacactttgaaacgtttaaaaaacctgcaatgattttacttgaatgcggaaagacagaatgctaaagctcaagcattgaaagagaactaaatacatagggtgtgttacgggctgaactgtgttcccccacaaatcatatgttgaagtcttaacccctggtaccctagaatgtgactgtatttggagacagaggctttaaataagtatctaaaacagggttgttacggtgttctctagttcggtctcactggcatccttaagaggagattaggacacagacacacacagagggaggggtatgaaaggacgcagggaggccgggcctggcgcggtggctcacgcctgtaatctcagcactttgggaggccgaggtgggcggatcacgggttcaggagatcgagaccatcctggctaacacggtgaaaccccgtctccactaaaaatacaaaaaaaattagctgggcgtggtggcgagcgcctgtagtcccagctactcaggaggctgaggcaggagaatggcatgaacccgggaggcggagcttgcagtgagccgagatcgcgccactgcactccagcctgggcgacagacagagcgagactccgtctcaaaaaaagacacagggagaaggtacccaagtacaaggaaagacgactcagaagaacccaaatgtactgacaacttggtcttggacttccagcctccagagttatggggaaataaatatctattgcttaagcacccagtctgtgtattttgctatgacagccccagaaaactaatacagatagtaacttgctgtagacactgtctacagagtaacaaacataggcaattaactgaacatgggaacaagacttagttggccaaaggtggtggtgcttgcctccaatcccagcactttgggaaactgaggcaggtggattgctttggcccaggagtttaagaccagcctgggcaatatggcaaaacctcatctctacaaaaagtgcaaaaggttagccaggcatggtagtgtggtgatacatgcctgtggtcccagctactctaccctgaaggctgaagtgggaggatagcttcagcccgggaagcagaggttgcagtgagctgtgatcatgccgctgtcctccagcctgggtgacagagggagaccctgcctgggagaaaaataaaaattaaaaaaaaaaagtcacttctgactatagggattatctgggagtctgcaaggtcttctaaaaggtgatattttaaatttaaaaagttacctatttttaactcctggtagaagtaaacattgttcttccttgaaaacataaacaaaacaacacgaacatctcagtattgatttgtcatctccttttggaccagatcaaagatctgcctgagataatttgacttatacataatattaaatggtattagagtgaggttacagtatatgatttcagtgtcttttatctcttacatactgtgttctctacccggaaggagtgaagcagactgaggggtcacgtggtcctatagtatagaaatcatatgtagaaattgattcagctctgatgcatacatatggatggataccttgatatttaaatgggacctctgtctcatttctccatctccctaaataattaaaaatcagttcactcttccgggaatcattttgaatgaattgaagagtaatttgcaaagcaagacgtataggggaaagagcatgcatgtgtgtttgagtctatggggacatcgcatttggcatgaggtgctcaggattcagaggactgtcttgcattttcctagcagtcagtggaggccttagcattccaacctaggaagctctatagatgtaagcaatgtgtttgctttatttgactgctatttatatgacagtgacaaacagatatggggtaaacttactgttttgaaaaggtcagacaaaggcaaggaaaatagaagcaaatgaagtgaacgcatgaaaaatgattactcaaagaaagatacaattatgcagagcctgaaatcaactcttggtttaatgttgtgatatgagtctctcaagagaggacagcaatccaaaaccatttccccagagaagcatggaattttacagttagatatttatttattgtgggaagtatttttaaacatctttcaaaatgcaaatacttagtgtcaatgtgtttttagaccctcctctgtgaaagagatacgtagaatggtagaacaaggtaagagtctaaggggaagtgggataaaatttcaggaagtgaggggttgtgaatagtctgaaatggagtatctgagctgcaggaggagcagcagccacttactggtccctgcgggcctgtgcccactagggcatatcaaaccctctgatggagctgctccaggctagcctcgtcaagccatctcccagcctcaggccgaggagatgcctgacggggccagcctggagcagctgcatcagaaccctacagctgttaagaacctttataccagcagccacaataacaccaaggtcacacaagatttcaagcaatggaggatgcagcaagacaggtgatagcatcagtgaaaactttaaatgagctacaaatgttaacagtgttcccctgcttaatttactgttttcctaaacagctatgaactatttgaggtgaagctcaaaaggacatactgaggtccaggaaattgaggtcaagctgcattttccagacagaggtttcaaatcctacatgaggaggaaggttatttacatattaagccttctgcgaagttcaataggtagactcttgagaaggcaagtcttgatttgtagaaagggctccatctcttaggcacctgagacccaggtcacccttagcgttgctcaggttgtacttcagaaggactcccaggtaagggaggagtgagagttaaattctagctcctgacaagcagggctgtgggtacccagaagatggatcactacttctttatatgcacaaagattttttttaattttattgtattttaagttctcggatacatgtgcaggacgtgcaggtttgttacacagataaacgtgtgccatggggcagcagccatcactgtagctccaggccaccattttttcctctgctggtgctggggagactggatggcttggtcccaagaggtagttcctacatttcagcacaccagctgtggaagatcgtggcccaactgcctctttaggacagactctgacccatccctcctcactgagtgggccctccctgcaggaactccagcaactccagccaggggcttagggaccaaactctgatcttcctgggcctgagcccctagtgggaggggcagctgtgatctccgtggatcagtagatttagtctcttctcctgctagctctgaggaatccggacagctcagacgagtgggtttcccccgagcacagcacactccctccaccaaaggacagtcaaagtgctttgttaaatgggtcctggatcccgtgccgccctgactgggtgagacttcccaacagaggtcaccagacaccttatccaggagcattcctactggcatccggtcggtgccccttgaggacagagatcccagaggaaggagcaggaagccatctttgcctccttaggtgacatctccaagtgtgggagggacccaggtgaatagtctgaagtgaacccccagcaaaccacagcacccctacagaggagggacctgactattgaaagaaaaacaaaacaacagcatcaacaaaaaagtccccacaaaaacctcatccaaaggtcagcaacctcaaagatctgaaccagacaaactcatgaagatgagaaagaatcaaccaaaaaaatgctgaacactcaaaaggccagagtgcctcttctccaaacaatcacaatacctctccagcaaggacacagaactgggtggatgatgagatggatgaattaacagatgtaggcttcagaaggtgagtaataactgttgagctaaagaagcatgttctaacccaataccaaaaagctaaggaccacgataaaaggctacaggagctgctaactagaataaccagttgagagagaaacataaaagaccggatggagctgaaaaacatagcacaaagatattttaaatgtaccaagtcatacagccattgagaccacatctttttaagtttttaatttgcaaaaagttgtagaggcagcccctatctccctttgtggtgtatcagcctcagggatcttggcaggtggaccagcattgggatctttcacagcataatttatctccatgcttctggtgctctgagtatctggatggtctgagactattactatgaagaacaaagtcatgataaggtatttctgcagcctaagaaaactgcagcattctgttcactgagaaatttgtgcttccataaaaaatgattttaaaaccctatctattattgcagtgaataaaatgagattttgagcctattgttggatttaatcattatttttatggcagaactggggttgtgggagtagttataaccagttgtgttcttttaatctcttttattaagtcatttatcataagtaaaattcagtttctgaccttggtgctttatttaagtttccaacttatctgtttcttagcatgttttgtgttcccattttaagtctgtaagggttatagaatacttatttcattttctctataagaaactgtttagcaatctaggatagtgttatgattaaatggcaaaaagaagagataatgtcaaaattaaagctacttaacagtaaggggcatggaaggctacatatcaaacccatctacactcaagcttcattttcaataggggattttctatggcctcttggctttcttgcttagcttaatccaagatttctgattatcaggacaagagaagagacaaagggtgaacacaaaaagtcatttagaataaatgtatgtcatatgatagtccaaattaaatgcttttggtattgctgtatccatattcctttaggttacatccattgattctttttacatctatctgcattgcatagccctgtaatacttaaaaaatttcaaacagagtaatgaaaagcatggaaattcaaaagacaacagtgaaagtaatggaaaacagtattaataatgtccagtggttgaatggcaatgagtgatactcaacgattgaggagtgaataagattaattaatttaactttgatggtgatgtcctctcctagaatcttgtttcctttcatgtttttggtacgcatccttcctctctctgatgttctgtttcaaaatttaccctcactattaagcttttcctattatgccaaccaaggttaacacatttttttttttctgaattcctataatagtgctgctatccacgcaactatggacttggtgagggcaggaataagatcagtttgcatcccatcagacccctagcactgttagcatagaattgggattcacttgtttgttgaataaataaatgtctggataaataattgccataaaatttgtacttaattttcatagtactctcataaaactgatatgtgttgagtgtgttttcgattataaaaatcttgaagagaggatcagtgactttcagctcttcattttcctaccctgacaatcctcagttctaactattgagattaacctcatgaagtagagtacaaggtacccaagggaagtctggagtagtccctgtgacatttctggtcttcacagaatggtgtttgtggttgtggtgagaagcagtggaaggttcctcccacacacatggtctttcacttttccctgaaatctggcacccttgacctgcttgtaacctactttgtgctgacccattcaccttaataagaaaggtaaatatataagcattacagtccaaatattttttgaatttttataaatggtgtttaatgctatgagattagaatgaatctaccatttgtagacatttattaaatgtctactatctaaaaatttaaatgtatgtacatcctcttttttgacactcattcgacactcattcacttcaatgtttttaaatatacatacagataatgaccaaatttatatcttgctgcactgacttctaaactctatgcagccatgaaaaaggatgagttcatgtcctttgcaggaacatggatgaagctggaaaccatcattttcagcaaactaacacaggaaggaaacaccacgtgttctcacgcataagtgggagttgaataatgagaacacatggacacagggaggggaacatcatacaccggggcctgttgcagggtgtggggtaggggagggatcgcgtaaggagaaatacctaatgtagatgacagattgatggctgcagcaaaccaccatggcacatgtatacctatgtaacaaagctgcatgttctgcacatgtatcctagaactgacagcattataatgataataaaaaaaataatggagatagcattagggatgtcagaaggagagcaagtttgatttcagatacactgagtttttaatgtcataagagatttaaactatacagtccaaatttttggagaaggattgagattttgttttcctattacacagaagaatcgaaaatgaaagattttattttctcagcatggatgcatccaggttttgtgtagctgaaagctttatacaaattggaggtaggggacctcttgatacaaaactacaaataaagtactaaatggagtctttatttaatgaaaaaacccataacaaatatttggagccttggatgctcgagtctctaattttttaagatgtcaagtgctttactagaaatacttacaatgttatgatgaaatgcttcctgagtgtaacctggcttcccttccttagacgagaactcctagaactcacgggtcctgaatctaaagcttaattcaccttgcagtaaattctcctctgtttggtccttgaggattgataaagacttattttgtgtgtgtatatgaccataagatatttcaaaatgcacttttatttcttctttttatgtatctagggtaacttttaggttaagaaaatgttttatttaggcttttctaattgcaaaaaacaaagattctctcaagctatttcagcagagggaaggctcagttcaggagctgagaaagtgttcacccactcaacataaccatgttggatatataatgcaatccagaccctgtaacatacagacacagcaccttctatcaaggagaaggagtgacttagaatcatcatcacataaatacatgtgcaaccgactgcaatagtgctatgagagacacaatatgccgagcacatatgacaaggaaacaaaccaggtcccctgggttttgtttacatgtttgctatattcctcttgtttttgatgatattgctggaggagacagaagggccaggacaatcaagattttcccgagcaaggattatttgagctgagatttatgtatggataggtatttgctaggcaaaagtagtagagatgagggatatgaggtttcaggccatggagttaagagacaagactagcttgttacaatggctcatacctgtaatcctagctacttggaggctgaggcaggaggattccaggaggccatgagttccagaccagcctggatattatggtaagaccactgtctctaaaaaatatttttaaattaaaaaatgagttgggtttcgtggcgtgctcctatagtcccagctattcaggaggctgagatggaagaatagcttgagcctaggattctgaggctgcagtgagctatgattgtgccactgcactccagcctgggcaacagagtgataccttatcacttaaaaaaaaattaaaaagaagaatgaaaacacaatacgcaacataacatggtgactcaaacctaaggttgatttagaattcgcaatagtttcaatgaaagcaaaaagtcatgagtcatgtctcttctttctatatctattctgtctagttcatgagtactggccacaggtgcctatgaacccttgaaacacagcattccagattgagatgagcttccattgtgaaatactcagtatgtatttgtatgtacatagtttgtaaaaggctttgtatgacaaaaaaggatgcaggatatctcattacaaactttcatattgcttgcatgttacaataataatactttggatattgggtaaaatagatacgaaaattaagtcgctggttactttatccttttattaaatgtggctactagaaaatttaaaattacacatgtggcttacctctgtggctcccattatatttctattggacattgctatttgagcaatgactcttagccctggctgtatgtacatcgccacccaccaggccacacaatagacctagggtagtagaatctcttagggcatctgcattttagacaaatgacctcatttgttactaatgattgtcacacaggtgttccacaggctgttcctgtaaatgccatggctcagatgtgtgtattatacattgtttctgcttctttcagcccttaagcctctggtaagctgtctctttgaatctagtcagagtccaggaatcttttcctgctagcatagcctcatgtgcgaaataagttgtgttgattcatttgccattaggacgactgtggtggcagcctccactctggatttactctgtagggattcgtaagtcatttttagtccatgactcttctcttccccctaggaagcccccaccagagacaaaactagagccgctttttatacctgatttttcggaagtcagcttcagaatggatttgtagaaaatcttgtatctctaccagctcattacactttgggtaacgttattgaacgtagaatttaagtttttaaaacagaaatgtaagtagtttcacgaaagaacaacttgtatagatcatgataacacctcgttaaattgaatagatccttgtcttagctgctaagtaagttgatattcctttaaaataccattcatttgagaagcagcaggaataagtgtagttttttcctctctccattgaactccagcttcatgagattatttattttattaaataaattcaagcaacctctaaaatgttctcaatttttgcagcatgatgtctaatgtctttatatggagtgtaaaaactctcacagtctggtccaagtccagtcttgttccccagttctccctctgctccagacaccctgaatgccagccaaactgcactacacattatccctaatgcatgctctgtgtattagtctgttttcacactgctggtaaaaacgtacctgagactgggtaatttataaagaaaaagaggcttaatggacttatagttctatgtggctggggaggcctcacaatcctgatggaaggcgaaaagcatgtctgacatggtggcagggaaagagggaatgagagctaagtgaaaagagaaaccccttataaaaccatcagatctcatgagacttattcacttccacaagaacagtataggggaaccacccccatgattcagcgatctcctaccgggtgcctcctataacacttggaattttgggagctacagttcaaaatgacatttgggtggggacatagccaaatgatatcactctgcttcttcaaatctctagtaatttgaaattattatcattattactacttttgagatggagtttcactcttgttgcccaggctggagtgctatggcgcagtcttggctcactgcaacctccacctcctgggttcaagcaattctcatgcctcagcctcccaagtagctaggattactggtgcccaccaccaaacccagttaatttttatatttttagtagagatggggtctcaccatgttggccaggctgctctcgaactcctgacttcaggtaatctgcctgccttggcctcccaaagtgctagaattacaggcatagccactgcacctggccttgtaatatgaaattagattgctcatcctagaatcttgtaacccttctccataacaaacttctactcatcctctcttctgacaccttccttcccgactcccttacataatgttagtttgccaaactctacttcagtactaaactctaaaggaatttatttgcatgtatacgtatttttcacaagtaagcactagagcacaaggttgaagttcattacatacctgtctttgatgggtagaaagagcagattatttgaagacgttactgtatctctaccttcagcctatgcttttctcttgccatgtattccagtttctattttttcgagacagagtccggctctgtcgcccaggctggagtgcagtggcgccatctcggctcactgcaagctccgcctcccgggttcacgccattctcctgcctcagcctctcgagtagctgggactacaggcgccgccaccacgcccggctaattttttttttttttttgtatttgtagtggagatggggtttcaccgtgttagccaggatgctctcgatctcctgacatcatgatccacccgccttggcctcctaaagtgctgggattacaggcgtgagccactgcgcctggccatgtattccagtttctttaagcttcctatatacagtgtgatttaaatctacttatcatctggatgatttgtcttttaatatacttccatttgcttatgttgagtgaagttatctgaggttagaataacgtacataaaatgatatgtgaattgtaggccttggagagaagtcttaaggacactcctgtttttagctattcttcttttccatttgctgctgtggactgtggtttattttagactaaggaagggcatggtgcggggtttccactgctgcttaaactggagttgaaatcctatgttctgcttcctggcccactcccagcctgcagaagcccccagcactgaggacaatctaaacgggcgggattgaattcaccttatcaccacttcgcgccgaaatttacagtctacgttgaggggttctgggttttgtttgtgttgtttaaattgttgtggtattgatattactgttttaaaattaataattatggtagcatgctttggttttgaagcttcaggttgtatatactgaagagcaacatctttaatttttattatttttattttagattcagagggtacatgtgcaggcttgttacctggatatatttatgtaatggtgaaatttgggctactagggcacccatcacccgaatagtgatcattgtatccaacagtaatttttcaaccttcacccgctctgacccaccccactttggagtccccggtatctataatttccatctatatgttcatgtgtgtctattgttgaactctcacttataagtaagaacatgaagtatttgattttctatttctgagttatttgtcttaggataatggcctccagctcaatccatgttgcaaaatacattatttaatccttttttatggctacatagtatttcatcattttatatatgtaatatatattttatatatgtaatatatattttatacatatatatttatatctattttatatatatttttatatctatacatatatattttatgtataaaaatgtaatatttaaacatatataaatatatatgtaatatatgtatattatatatttatatgtgtaattatatattacgtattttatatatttcatatatatgtaatatctattttatgtaatatattacataacatatattacatgtatgttatgtagtatatattacatattacatatatacacacatatatataatatatacacacacagacacacacacaaacacagagacacaaacatcttcttttcctagtcatctgttgatacacacttaggttgactccatgactttgctattgcaaatagtgctgtgatcaacatatgagtgttgggtagatacacagtagtgggatggctggatcgaatggtagttttacatctttgagaggtctccgtattgttttccatagaagttgtactaatttaatttcccaccaatgttatataagcattcccttttctccgcatccttaccaatatctgatgtttttgactttttagtaatagccattctgacttgtataagatgatcatcattgattttgatcatctcattgaggcttcaatttgcatttctctgatgaatactgatgttgagcacatttttatatgtttattggccacttgtatgacttttgataaatgtctgttcatgtcctttgcccactttttaatttttttgttgttgttgttgtttaatgaagttgttctttgagttctttgtagattctggacgttagtcctttgtcagatgcataatttgcaaatattttcttccattctgtaggttgtctgtttattctgttgtttatttcttttggtgtgcagaaactttttagtttaattgcatgttatttgtctatttttgggtttgttgcattttctttgaggttttcatcataaattctttccctagaccaatgttcagaagaatttttcctaggatatttcatgtttttttaatagtttcaggtcttacattcaagtttttaatctatcttgtgataatttttgtatatagtgagaggtatgagtccagtttttttaggcatatggctctccaattttctcaacaccatttattgaataggatgtccttttcccattgtttatttatgttgattttgtcacagatctcttggttgtgtgtggctttatttctgaatcctgttctattgatctgtgtgtctatttttataccaataccatgctgttttggttattatagccttacagtataatttgaaatcagataatgtgatgctccttgcttcgttccttgtgcttaggattactttggctcttcgagctcttttttggttccatatgaaatttagaatttttttttcttattgtgtgaaaaatgacattagcaatttgataggaattgcattaaatctgtagattgctttggggcagtatagtcattttaacaatattgattcttccaatccatgagcatgggatgtttttttcttttgtttgtcttctatggtttctttcagcagtgctttgtagttcttgtaaagatctttcacctccttggctaaacatattcctagatagtgtgcttgtgtatgtttgtgtgtgtgtgtgtgtgtgtggctattgtaagtgaaattgagttcttgatttggttctcagctcgaatgctattggtgtatagaaatgatactgatttttatacattgattttgtatcctgaaaccttactgaagtcatttaccaaggctagggatcttttgaagggacctttaagatcatgtcatcagtgaacagagataatttaacaattccttttcctgtttggatgccttttacttatttctcttgcctaagtgccctggcaaggacttctagtactatcttggaaagtcgtattgagggtgggcatccttgtcttgctctagtttcttaggggaaatgctttcaacttttcctcattcagtgtgatgttggctgtgagtttgtcatttatcactcttactattttgaggtatgttccttcaatccgtagtttgttgagagttgttatcataaaggcatgttggattttgagtgctttttctgcacctattgagttgatcatatgggtttttttttaattgtttatgtggtgaatcacatttactggtttgcataggttgaaccatcctttgattactggaataaaacccccttgattgtgatggatcatctttgtatatgctcttggatttggcttgctagtcttttgttgaggatttttgcatgtgtgtttttgcatgcaatatcccagcatcagggatgttgacttgtatttttctttttttgttgtgcccttgcctggttttggtatcagagtgatactagtttcatagaattagttaggaaagaatgcctcctccttaattttttttttttggaatagtttcaataggatcgataccagctcatcttcattcatctggtaaaattcagctgtgagtccatctggtcctgggctttttgttgttcttggaagattttttgttactgatttaatttcaagcaaaatcttttaagaaagaattgtaaaatatacatatctaagcccaattaagaccaataaaatgtttgtaagttgaattaaatagtttctctttattcctggtacagtttaaattgccacttgtcttgaagtaaccattgtctcagctatgttacagataccatagcttgtaaaaataaacaaatgaatttgatgccaaacttgaagctcatattggaatgtaatggttttaatgcagacacaatttctttctgtatcctgattagattgaagcattgttttctactgtaacagcataatatttcatcaaaacatacctgtgtttgagagctcataaggtcttcttgtatattgggaacagatatggcaatattaatgactatgttaggttttttatactagcacactttcatatatgtatttgtatttataagaaatttttctttcaaatgctgcgttcaattgacaaaaaaaaaactgcaaatgaagcacagatgctgtgaattggaatacaatgtgcaatgcaatttagccctgtaggctttctggaaagaacccacttcccctatgatgagtagagttgtcagtagtgacaataatgctgttagacgtgaaaaccaagtgtgctcacctatgattgactgacaaagccacggtgcctccatgaataaaatccaagtgctgcgttacaattcatctcatgatttttgtggttcagtaatttatctttataaaacaccaatgacagctagtattccgttgttcctgtgagtgaaatatgatatgcttgcaatatggtttgaggattcactaactatggctatgtacacataatttgtaatcaagttcatgcatgagtagctgaaatataaataggaacatttaagactgtctcaaaactagattgaattctccatttacgtagtcatagcaggatggttcaggtacatgtcataatgagcctttgatgaatgtttgagacattcagaaaaggagtagaagccaaatgagaaccaaaaagaaaagaaaaacagaagaaccatagcattacaaagctaaagactagataaacttaatttttcagaagcaaatcacataatgaaacaccaaaatgagaattaaaaagtcagaatttactactatttgaactcctgagtttagccattttttctctgattttccaatgttgaatggagataattcaggttgctaagtataatattgaatatatatttaccttagaaatttgcacatatacattataagcatatttgtggggatgctgtacactagaaagtaccatgatttactcgtattatagtctatagctgctatattcatcctcccaagaaatctgttattatgccatttcttccgtctataaagttcttactagattaagttcaaacttctttttttttttacttttcataaactttattgatagtggccacaataatttttccttttctttctttttaagtaaacaacatttaaaagataatagtaaatgaattcaaacttcttaatttgaaattcgaagtccttcatcatctggtttcaactggtacctctggtcttatcactcattccataccatgaaatgcatgcaaattgctcttgctgaattatacataatccacttgctcattcagcaaacatatattgagtatgaacaactctgtgggtttaaagatagaaatatgctgctaatggatattcatttatatattctaggagctcaggaaggggtggaaaccatgcaaaaaaaaaaaaaaaaatagcctcctacacttccatcccttaattcttgacaatctcttcatttcaggtagcttttccatcaatttccataaatagaaacttttccatgaagtcttccctatatcctcaaaagaaagtaatccatccattccatagttcatagtgatttcttttaatattaagcaatgttcactgacttttatagttacttctctacatatgtcttccataaatcagtaagtacctcagaagttgaggaccatgtttcaaatattttctctatcatccacagtcttcagaatttgtaactacagaacaatctgttgaatgagtaaaatcatggaagtatagttggggacaaaattattcttatttctttcttaatttacctccttaaagatgtaaaagaaaaaagtctaatttctctcatctatgactgcagtgggtgtaaaatcaaaccatttaattattaaaatgaaaaatagcacatttttaaaagattcacagtacattttgtgaagttttatactgaataaagttttttataaggaaaaataaagcataattattggaaataaataaaagcgtgataattgtctccattatatagctataaaattttatgtctatcattaatcccttataattatttaaaattatttcagtcttttcgtataatgttaagtaataaaacttgcataattatttttaaaagtctaaaaattataaataacatttataattctgcatctgtgataggattttataactgtacttgtaacaaaatggagcttacatttttaaatgtaaaattgaatgaatacaaattactttctatcctgaatacagagcattatacatagcttgctagacatagccaaaaatacatacttgaaatcattataatgaagatgattaaataactataatcattctgaaccctatctttatgatattatgccaaatgtgttagtaatacttacctacattttgacatgttataatctacataaatttactagtgatagatatacttggatttcagataatgcactaaaattttctgcatataataaatatttttataaatgtattatttcttccagttaaaaataatcatctctaaagaaaaagtaaaatataatgctataatttcttgatcaggctaatggtgagacgattattcattcttaaagctttgactcagagataataaatcttgctgagaaagacgtttgaattcattatttctcataataaatgctcagtaaatatttgatgaacttaggcgatgggtccccatagttttattgtcagtactcttcatgtttatgccaataggacctaataatcatataaactacattttcatctagcatctgatttccataaaatgataactttgtcttcttcagtatcatctcattgtcttgacatagtaagagctaaattataatattgattattattaagtgcctagttaaagaaggaaggaaatcatcctagtcagtttccttatgttgcttcataaacctatccctagatgatccaccagcttactatacaccaggcattgttagaattctcgtcagctctcaatggctcccttttgtcacaaagtcaacattgacttgaaccaatgtaaacgctaaatactttaagaatgaaataactatatgattcctgtcttgaggtaacttcatcgatcacagtagaaaatggtaagtttacaagatgctaagtagggatttattaggatgtttacacggtggtagacagagatctgtcagataggtggacggcctaaataaaagcatgagatttgttcttaaattctgtctgcagagcacagtgaacaattcaagtctacatgtaaagtgatcttacagtgacttacaatggactctttctgccttttgtatagtacaaatgatgtttgttttccaaatgtatacagctaattgtaaactctttcttgtgtaaccataacttttgtttgagccaagacattaccagagtgggaaagccgctgtttaaacaaagaagaaaatcaacagtgaaaagaggtgtctagtgaccaatttctgtttgcttgagttccctttgagaacgggctgggaataaataaattaaacaactgaggcttttacaggaaaacaataacaaaagcccttttctgtctttgcacagttcagagacaaaaacagaggtcacacatcctccagcaagtctgcttcatattcaggcgtctcttacagggacgaaaaaatctctcgtagaagtcatgctcaataaaatgcaaactcgtttacgaaaatgccaacattttcattttcttttgatgactttctcagagaataatgatgttcagcttagggttttttattttatttttatttgtagtgccctttgggaaagaacattttctcttttaaaagccacacaaagtttaactcaagcagtctcattgttctttctcccacaaagctagcaagaaagactaatgtattacttaatgaagctattcattgcttaataaaaataagaattagtaacaataactgttatattcacattaaccttacttttatgctttaacatagaaattgttctgatgtactatatttctaccataatttgctttaaaaaataaagcgagtgggaagtataaatcccatgatatgaaaagtaagatatccttttcattgttattgtagaaatctgagttaataacctgtgctaaacccagctaacaaaatctcaagttttggaaagtgcagagttgtaatactgatgataagtggcagctctgaaaagtgaaaaaaaatctttgacttgaatttcacaaacttgggtcttactaccaggttttcaacttactagtttatatgggcaagtctcttaaattttttgaatctcgatttaatcatctgttcattttcaaaatgggaagtaactctggctgttacacagaatggtcacttattaaatttttgatgttcacatataacttaaaagaaagttcatatgtaactttaaagaaggctatatgtgaacattacaaataatgataaggaccaatataataaacctctggtgcaagatttttataacgaatcatcagcattcaatataggaaggctgcaacattgctcatagatatctcccttgaaataggtaaattcaccagatttacaaaatggattagccaaaagcttatattaaatattatttttaaaagacaatatgtatattaagaattgatgctctgtgaggtcagtaactttatttttgatgtagtcatattgtctagggtattgtctgacatagtattgaataattgaatgaaagaattccctgaatatactttcctttagtatattcacaggctgatttagttcataactacaatcctcatgaatatgttcttcatgaatatatttattaaaagactaaacctatgacccttagcttttgataaattaaataatccctacaatactactaatatattcacatttattggatatatttaagagaaatatattcatgaatatattcataagatgaatacattcatattcatagaatatattcaagaagaatatttcttaacacaattacctaataaattggtaaaattgatgaatttggtgagttagtcatcacctgattctttagataattgtttttggccaatccactcttagagaattggttttcactgaattgatctagagacccttcccttgactatgacctgtgtgatcatcagcaggtagctactagctactggagtttaccaccctctacacctgtgagctgagatcaccttctgtgaaactgctgttgggggatagacaggacctccatcttccaaaaggagggaggttagaagccaatgtcttcttcagaccaagagtgacttaattcgctcatccggcttactgtttcaaattcttctccctaaattctgtgccttcttagtcctccttgttcttcagaggctacggctttaccttggggagatttgatagtgggcatgaaaccttagtacaacttgttaaaggctgagctagacacaaaggggacactctaatttagctattagtctaagtgtgtaatccatataaatcaggtgtgaccagccacatgaaactcctttctcaaataatgtatatttagtttttcaaacttgacttatatccccagctaccaaagaacttagcttctccaggaaagtcactgtcattgtgagccatggtttggatgacatcatcatctctcaaatatgtgagagcagagtgaagattgagaatcttcaagctaatttaagccatgacagtggtgagatttcaagagttaaacattaggctatttgaaccatctggttatactttttagtctaaggcatacagagatggtgaatttaagaagaatgaagatgaggaaagcctgagaaaatttaaatacagggaagatgatggactctctacagtttaaagggaaagcaaaacaaaatggtgcttaattttatattatgtatctgtgtgtcataaaagagccttaatcatggttgataattaatcaaaggaaagccctttatttttattattaatttattactattactattatttatatgtagagaaagatgggggtctcactctgttgtccaagctggtcttgaactcctagtctcaagcaactttcctgctttggcctcccaaaatgctgggattacagatatgaaccacttcacccagccaccattaagtttacaaatgaaattagacataatttgaaagtgatatcaacttgaaaacccttaaaagtgtcctgaagtcaccttcaaaaattttatgaagacattgtctactatgccatagtccaccaataatttcttcttatacactgcagttcacatgacattaatggcattgatagctatcagttttgctaaattataatatattaatatcctacaactatatgcatatttcatgagttttttgacacatctatacccccatctaatgagttttaaagataacagtgactccaatattttccacattttaaggtatttttatgttgtacattaaatatattcttgccctgatttattattttattttgttgacatatacatatggaaaaagtccatattatgattgtatagttcaaaggcttttttttaaaaaaaactgaacatacctatgtaactagtgtctatatcaagaaatagaatgttaccaaccctccagattgcttttagtttcaataattcattttaactagagggatgctcatctagcaaccaactttaagcaatacgcagcaagtagctaccaaaaacaatataattgtgctatataataaaaaaagattatctgtggatctagctaatgttgtctttagataggacatgttctataaataagaaaatgataattactcatttgtatcatagaagtttaacattatatgtcatctaacctaccagaaattctctcacataattgcctttgtggggtattgctggatgacatcttcatcctaatattagtattccagagaatttctgaaatagagaacaaatgcttttcccaaaaatcttacttctatcttcaatttcccagtactttctgggactctacaacttggcgttaaatcacagaagtggctatgaattccctttcagattttacctggtaaaagatcttagttctttctatggtcctggtttcatcttccatattggtatgtcatttatttattcccaagattctatgacgttaccaggacttcccatcttccctttactaagatacaatattcaagtgacgagtcctacattttccacatgtaattttcttttttcatctcggtgaaatctctttcatctctgtaggtgttccatggccattgtgtttaatgtttagagtcatccagaacggcaagtacaaatgtgaagccaaaagttttcaacttcaattatataagtatttattttaatgtgccctaaataacgtgtttttttccccccaaatcaatacatcatcattggtctttctattcctctctatggcacatgaatgtattctagtcttttttttaagtagttagcatgaaaaggaatcttgtaattcagctggaatgaagcgttcattttagtgataaaaatttggaggacagagagagaaagcaacttcttcacataatattacagtacatgctgcccaaattctaacccaactctattttagtatatcacacggctctcctgtcttacgtagcatgtaatgaatatcacatatgtgtgcatacacatatacaagcacacatacctgacttatgcacatgatgccaacccatgaaaccatattaataacaaatcaatatttttaaaatttatgctaggataaaaatattacattttaaaatatttttatttttaaccattaatcaaatgcctatcacatttagtttataatccacaaaaagacttggtaacatacatttatatcctaatatgtgttacttcactcacataaatactgttttaacgtactcacctatggcatttttccacacaagttttgccactaggagtaagaaaaactaccaaaagggcagttgacactcaaaaaagattattgttgaattgaagatttctgaagagacatagttaatgaataccttgagaggtacctttcaaggttcagtcctcattaatggtttaattggaggaaatgacattgagctgaaacatacagaagctgctaggagtcatgtagaagaataagtagtagagaggttggcaggaaaaacctacctgtaaaaggtaagcactgagtttttgcctatatctgcagcctgggtgcatcctttgaataaaagttaaagattatctggtggcatgtataaaaacagagttttataaaaaaaggattaatgcagaattatctgaaataagaaactctattcttattatgcaatttataaagcaatttaagaataattgtttctattcaaatcataaaggattgtacctggatgtaatattttaagatgtcttttccttgtcaggattctgatcatgatgatttcctgaacttgggaatttctgagcccctgagtgactggataacctctctaacttaaaaacaattatctcactcgtgttacccagtaaacacaggtataaaaaggctctattttaatgaaagccactaaaattcaagttctttatgattattatggaaccaaaattttgaaatatttcaaagaatagaattaatcatacatactattttaaaggaagccattaaattacatttctgacaatttttcattttaagcttttgttataaacatttagaaaaaatgagaaaattgattcaagaattaaccttgtctaaattgtcattattttcatttttgatattcctattattcctttttaaaaatactttttgcattgcatctataatactaatatgacagaatttaaaaagtcattgaccaatagcattacataatttcttccttaatacataagaggacaggaactatgtgcctttgggacatggagaagaggcaaggtgctctgtaatcattctagtgttcatttctctaacaggataacaccagccttgaagacgggaccaatagagttttaatggcatattacaattaggatatggaaaacaagagaatgcctatatttgggatgacttcttgtcagattcccagttggataccaaactaatctcagctacactctgtcttccccatttatttttatttattcttccaaagctatgtaactctgatttgtaaaatatagagaagcgttttctagaaattataaatatgtacataaagctatttacatatcattagaccatacagttgggcaaactccataaagtctggaatcatcagatttatttttatattgtctacaatgtgtcaaatagatatatcctcagaaaaagtcagaggaattgatttgaatgtccttgccgtttacatagtgtcaattttctataaaccaaggatgattttgtgcctttatagaaaactaagatattacatttatctgaaacatatatgggacaaaaataaaggtctaaaaataacttagtcaatttagatttaagaaattgtaataataataatgaaaacttatattcctaaaatgatacaataacaatcttatcactacaaatctctgcttagaacagaacaaaacagtgactgtaaacaaatactaatatttaatttaaaaaattaacttggatatttattttaaaaagctaaggaacaggaaatataacctataaatgtttaaatagaaaaaacggaacgtaagaaaaataatctgaaaagcataaatgaaatgataatatatgcattacccaataaagtcaaatggtgcaattaaagaatgatgaattatataaaccagggttctgaacctgagagaagacctaaaccactgaaagtgcatacaaatttggggtatatatgaatgagtttttcttggatcaggattcatagttttcattagcttctcaatatacaccactattcaaagttcttctcctttatagctaaactactcgagggtcatatcttccctttccattcacctaccatattctcccctttccactccaatcaacattctccttcacattctcaaatctaatgttcacttctcctccttgttttacttgatgtctcagatgcacttataagagttgactagtccctgcttcttcaaatagtttccttcttcacatcacattctcctattcttttactggccactctctcagtaatctttctttgttaaagaaaaaaaaatattcagtgacacttgttacggcatggtgagaaatattttattcagtgccatctcaatgggtatggggaccacagcaatgggattttgcagtggcggagactacgctcaacttcaaatatagcacgggcaagtgggaatttatatagccaaagaatagagtggggtcagtggatgcaacattactaagaagaaacatcaggtgcaaacaggattctggttaaactgtcctaacaggattctcactgaaaacaagctggggtgatccaccatcccccgggagatggcgaaggatgaggaacctgatcagatatcatcggggtaattagatatggaaaatcagagcagggggagtaggaatgggggtgtgtcttgctaaactgacttagcagggttctttgctaagctgaattgtataaggaattgcacagatgggccttggagaaacttcaggagcttaactaaagtttagtcaagcaaagaatctctgctacctggcctctcatccatttcctcaactttgaaaatttagagtactccaaggttcagcctaaactctcttttctgtgtcaagtctctccccaggtaacttcatcttgccccgtgacttacactcatgacatacgatttgtatctccagactacatttttttcttgagctccagacccaaatatataactgcctacctgatatctctacttggtgatctaacagattcgcccaacctcgactccctcccccagtctctcattacagttaaatggcatcaatttccactcagttgcttaagttacagatctatttctcaaactttcgacagccagtcaatgacccaccagttgtgcttccaaaacgtgaaaaatctggccacatttctccagtgctaacctccgtccaaacttccatcgtctcttgccctaatgacggtaagagcatcctaatagatgtccttaccttcactcttgccttctacttatcaggcctttacctatatattttctcttatttcctcagtccttcccccttaccttttgcactctggtccctttggtctggcactccaatacaccaagcatattttctctcagggcctttgcatcaaatcatcatgtggctgacctcttgttgtccttcaggcttcagatttactgtcacctcctcagagcattacccttttgtcaatcattcttatctctctattacaatctctgttttagttattttatagcagttatcactgtctgaaattgtacctgtaaacccattgtctgtctttgcacacaagaatataagctccctgagggcaggggccttgtgtgtcttctttactcttatacccctggcacctcaaactatgccagttgcattgtaagagatgaattaatgagtgaataaatgagtgaaagaatgagcttgactctttgaaggagaactgtaaaagggcttaagctggtgggagcaaatttacacgttcctctctttagagaacagctgaaaagttaagatgaaaagcaaagactgtcaaatcaccccagtcataagaaatcagagaaagcagacgatgatcatcacgtgcttcttcctgttttttaacctttcttcagttatcaaagtaacgagagtagtttgcagttactcatggccaaagccagatgaaatacaacagatattaagtgtgacatctcttcatgatatgaatattttctctgttatacttttttgggttttccaagttttttccaataaatgtcactttatggatgaagaattgtattctttaaaagtctgtatttaaaacctgaaacccatctcaaatgccactctataatgtctttgtcttgtgacctcacacactacatacaaaatgtgatgtgttccttttctaaaacctccaaagtgccttccctttatacatacatgtactttgtctttatacatacatgacaaaataataatgataaaagctgctactgtctctcaatagtatcaggtacctcatatacattatgactcatgaatcatgatttcctctataaggaaaccaagttacaaagaaatgtaaaaacttattcaaattaaaatagctaaatatttctagaccagaaaccagttatgacttactgtatctctagtgctaaaatagtacttaggaaatagtaggtattcaatacatatttacaaataaacagaggattgatattgtcatttgaaaccctggtataaatgacatcctggtatgatacccagacttaacggctttaccacaccccatcttagatcttacctacattttttcattaatcaatagtcagatgaattagaaccctccttgaagccaacaatagcttcctattcatgacaacttgtattgtgttttatattcaacagagaatcaaatactaaaaaaaaaacaggagagacaattggggagagtgagaaataaagaggaaagaaagataaaggaaaggagggaaggaaggaagaaagaaaggaaagaaggaaggaaggcaggcatctgccaaaagtgataagattaatgaaaatggctccttgtataaacatattcctactaaagttacctggtctgtaagattatgtcaagaaaagaaattaatcattggcagaataataaagtttcaaataagagtttttgaagtatagtgatgtttgtcttttggctaggaatcagtaatggttgaaaaagctaccaaaatttttttcatgaacatttagtcttggggtagttatttaatttttaatatgctaaaatattgatctctgtaagttcaacattttaagagtctaattgttttctcctgtttaagagcaaataatttcatatatattgggtttcccattgtttgatgacgtagaaaacacagcataaagtagacattgaatgaaatttagttgaattttaaaatgaatagcaccactattactccatttgaaaacatttacatattattgaggtaaaaattacatacagtagattctcatcgttctcattagtcaatatatagttatgttctgtatagtcactgtgaaaattgaattggcaactattgaaccatttttcctacgggaaatacagggttaggttcctgccagcctctgatcacaatatttgcaccaactaatcaatacataaccttgttttgtgtgtgtttctgtttaaagttactgtatttaatatttatcattgattaaaactgaactcatgttcaacagcattataacttatgcctgaatcaaatttaacaaacacatattttttatgtaaggcacataacagctttaacttaggaacactaaagagcacttcagtactatgtcaggggaccgcttttaacagcaaagtcaacaaaagcaccaaagtataaaaaatatgacactggcagggtgcagtggctcactcctgtaatccagcactttgggaggccgaggcgggtggattgcctgagctcaggagttcaagaccagcctgggcaacccgctgaaaccctgtctctactaaaattacaaaaaaattagccgagcgtggtggcttgtgcctgtaatcccagctactcgggaggttgaggcaggagaattgcttgaacccgggaggtggaggttgcagtgggctgagattgcaccactgcactccagcctcagtgacagagtgagactccatctccaaaaaaaaaaaaaaaaaaaaaaggcactggatatacagtgaaaagaggcactggatatacagtgaaaagaatacctgtttgcaggttgagaccttaaacaagaaggcaaagcgttagctcagttggaaacttgtgccttaggaccactctgtacatgcatgagtctttaaatgaccatgggtattgattttgggtttataactaaattttagcaagtaggcaaattcacaaatgttgaatctgcaaataataaggaccaactgttcatgacatgcgcagatcttaaaagtacaattcaatggatttggatgagtatatacacttagacagcaaacatggaatcagcatatagaactttttctctccctcagaaagttcctcgtgccaccctacagtccattcccacttgtgcccaccttcccatagacagctgctgttctgatttctatcagcttgatttttttattctttttttaaattttattttacttgaagttctgggatacatgtgccgaacgtacaggtttgttatatagctatacatgtgccatggtggtttgccgcacctatcaacccatcatctaggttttaagccccacatgcatgaggtatttgtcctaatgctctccctcccctttcccctcactccacaacaggccccggtgtgtgatgttcccctccctgtatctattttataaactagttctatgaacatattcataaaatatgttatttttatgtccaggtttttcttacaaaacacaatattttaaaaattcattgatgctgttgcttgtatcactagttcattcctttttcttttttattatttagcaatatttccttgtttgaatatatactgtatgtacatgtgtttatttccaatttgcaactgtcatgaataaggctgtcaagcattcctgtatgagtatttttgcaacatacattctgatattggtagatatatacttaggagggggattgttgggtcataggattaatatatgtttaactttattaaaaattgtccagagttttccaaaaagattgtacaattttatactccaaccagcaatgcatgagggttcaaattgctctagatgctagttagcccttttaatttttggccaccgaaatgggtataaaattatatatcatggttttggtttccctgatgactaataatataaagcactttttaatgtgcttatgaataattaatagatctttatttgggatgtgacttctgcccattttttccagtgattattgatttacaggagctcttagtatattttagtatattctgttttaagatacatgcactgaaaataatttttcctagtctctttcttgccgtggattttattaaccatgtctgttgatgagaaaaagtttttaaatttgatggatctcaaattatcaagtgattttgatgtcctctaggaaacctctgttagcccccaggtcctgaaaatattctgttttcttaggtctcaaatcctttcagaactatttttttgtttgattgtataaagtagaagtcaaaaatacatcttctctgtatttatccagttgttctggcatcattttttgtaaaagacacttttcattcaccattaaattgtcttggtgcctttgttaaaaaacaattgactacctacatgtgagtctatttatgatctttctctgatgatatacatgtataatcttgaaatcaaatgataagttctctaacttggtttttcttttttgcttattttgaatatttaaggattttttttgcattttcttaaacatttttgaatcatctcatgcatttctacaaaaactatattgttgggtttcggttagaatcgcatggtatgtatctccatttgtttagtgccttaatttctctcactgatgatttggaggaatcagggtggaactttaaaagctcccccaaatgactctcatgtgcagacaagataaggaccactacctagatccttttttcttagaagaatttgggtgcctgtaagaaaagaattcatcccatccatccctaagattctacgtattaaataaatgaagtggtcatttctgtttgtttgtttatttgagacagggttttgctcttattgaccaggctggagtgcaataccacaatcttggttcactgcaacctctgcctccctagttcaggtgattctcctgcctcagcctctggagtagctgggattacaggcatgcaccaccatgctggctaattttgtatttttagtagagacggggtttcaccatgttggtcaggctggtctcaaactccagaccttgggtgatatgcccgcttctgccttccaaagtgctgggattgcaggcataagccaccacacccagctatgaagtgatcatttctaataacacatccaaaaaatgtcatgacatacgatctccccaatgtatttgttttacttaaagtttctattcaagtgatttttccaaaataaccacacattccaaagtgactctttgtaactttacaataaggcatttggcagtttctttatcataaaaaacaaaagtaccttgtacctgcccaagcacctttttacatgttttatctgacaacaattgatcatatttataatgtggtttagattggcatgtgaaaatgagaaaggtcaaaatggatccattttcttatgatatggaatttttatagataagaaatagtgcatggcatatttatatgaaaatttatatacctttttaaagttttattgcataaaaggataattgattattaataagatatattagtaacacatcatagaaccctgtaactgcctaaagatgaattcatattctaggaaattttgctctcaagattgaatattgatcacaagactgaaaactccagtcactgtaattttacttgaagcattttctaacagatgttacatcttggtttgccattatattttaaatacgttctttttcttttttcaacattcattaaaccagtcttttcttcttgtctctaataagagcaacatctgtttcttcttgttcaatcaaagcaacttcctcaagagtcttactttaaaaatgataacattagaaagcacggatagaaaacttttcattaatattttacatttgcatacaaaacaagtgtttctaacaattataagttagggaggtgttagagaaaatattataaaacaatttagttataaaaatataaaatgagaaggtgctgtaatatggtttcaaagatgttcgttttaggttaaattttctttatatgaatatcagtttccttttagaaggtacagttgaaacacttttatcattacgaattataacaatggtacataccacactgtatgtggtacagaattataacagtggtacataccacaccgggttccaattcaatctcagcctcttatggggcaagctccacgtgtgcctgaatatattatgaccccaaatataaggcaattctccattttccctggattattttatatttttactaacttgcacataaactgtcaaggcctaagtgaagatgtcaataatatttatgtgtttttcagattacatacataaatcatttagaaagttcattttttcattctcactttttagaaataattttgttctaatgtctgcacaggcaactttaatgtcagtgtctttgccctaactttgtgaatcatctacacatttctgtagaacaaatcatcttcacctttgtcttagttgtttaagatataggataagtttcccatatcactgtatatgttttcccaagcctcaaattcccattaacaaaggactggctaagatgcattttttagttgtcctgtaggtgaaatttatgatctccacattgtaaagacttactgcattgctttcttgtttagaaagcttatcactacattaatatttgtaattatgagatagtaaactccaaagacaatttttttttttgttttgagatgaagttttgctcttgttgcccattctggagtgcagtgacacgatctcagcttgctgcaacctccacatcccgggttcaagcaattctcctgcctcagcctcccaagtagctgggattacaagtgcccaccaccacacccggctaattttttgtatttttagtagagactgggtttcatcatgttggccaggctggtctcaaactcctgacctcaggtaatccacccgcctcggcctcccatagtgctgggattgcaggtgtgagccacagcaccctgatgaaagacaaattattaaatgtgtctcagcttacttttctatgaaataaaatgaattaaagtgtccatgtttttgtcttaataatatagatacactgtctcctatctggcagccaccattctaatgctgtacaaatactaatagtaactagtatacaaatacttaatccacctactcaaagcctcattttatttccagacctgatgctgtatgagatatggctatccccagaaactgagcacttctccagatgtggtagcaaatggaagtgtgtgtgcgcatgcgtgtgtacccatgtgtgtgtgtgcatgcgtgtgtgtgtgtgtgcacgtgttgtgtgtgtgtgtttgcatagtataagaaaactctgatcatggatgcacagggtctatataaataatgtattttgttgtggttcttgtttatttgttcaagctctagaaccaactatgtctgagttcaaattctaacctttacctgttaccatctataggatgcttacagattggtagactcagtccttccctatatactggagataattgtttaaaaaaattttgtgaggtattacgaatcaaatgcaagcaaagtatcaccatggctagcacatagagcttagaactttatactatatatgctgacatataaaaagatcatgaaattctattcttctctggagacagccttcaggatactatttcttacaagatgtagacaaaatatgaaagaagcagcacatttttctataagaaattgggtcttccttgccacatttaagaataaacttcattacatttggggacccatttttatcatagattactgaggtattacctcttgataattaacattaaaatttcaaaataataattggaaatgaaatgaataggaatcaaagcttaagctttgatacagtagtggctgctatcagcaaggatcctttaatctgggttctaatttctctagtaattaagttcctggaagaaaataaaataaccttttaattttaatctgattagaataatagaccttttgccatgaaaaattaaaaggaagatgttccatttctaaattaattttgtgatggagaaattgtcgtggaattctctgaaaggctttcttgttcttccacttagagtaaccgaagatattttataagggtctatctctggacatgtgattatttaggattggatttggggactgaacaaatatcacgttgatatctttgagatccatgtcctaaaactgtatttcatagcagggtttgtcaaattataaagacaaaaatcaaaaaaccatgcagtcctatagttaatcaacaataaatcctactttgtactttaaagggaaatgctatggtgaagatagggtcttcagtgcatcaattccttgggaatacccaaagggacccacttgagatggaactatttcagtaaacactgctgcttgactgacagttaacttcaagaataagcctttacatgcatagagtaattttatagtacaagagattgtatctgtgttgttcttcagaatatttgaaagataagaaataacatttattgttttcccaatttttgtatggacaggaaaaataaaactctgggattaaatgacttaagatattcttgtcagaaacagaacttggacttaaatcatgcctttttctttttccagtgaggaactatcttacaaagtaacctatgagtaccaaaaagtagaccctgatatatgaatatgggtgcatattgtttatttgacattggtccaataaatgcaatctgggagaggggaggtgagacaagttggggtggaaagccacaaaaaggttctttaataaggagattgttactatgggcacctgagttctagcccactggagtctctctgagaggctgtagtaactacagtcccttgcacacctagtttctggactgttcctctttctacatcattggaagccattgaaatgtatgggagttttctgcaggtgacagccagagtgggatgaagagatatacttcatttaataacttgataacagagaaaggtcaattacaaatggacttaggatgatggggatttccaggaacatctattgacattaaattaaacttaacaaaaaaaattatatccacttaatccttacccttagaatgagtcatattgcacattaccgtgtagagctgagaagccatagtcagcaactccaatgctatttttattgcttttttatgtttcatcatttacttggccatctatgaaacctagagtgccagattcctggtcatgatcactccctcagattcattcagttattcattcacacccactatgtaccagacatggttttaactttagggtttttttagtagagaagaaaacagacaaaagagagcttataatcaagtgatagaagacagaaaattagtaagtatgctagtaaatgaacatataataaatttagtaatgagaaactataaggaaaaataaagctcagaaaagaaggaatgttgggagagagaggaaaatgatatgttatttagaatagctaggaaagaccacctctctcttaagatgacatttgcacagagatctgatgtgagggagcaaaaccatgcagataattcacacgaggcattccagatggttcacatgacacatcttagttcaccaaaaggactttagtcagtacttttcgtgagttcaaaaagaacagaaagctgttatagggaatagtgtgatctcagttatacatttataaagataataccactttgtggggagattagactgttagtgcaaagagtgaaatcagaggaacaattggggggtaatgaaatactctgtattcatctgttgatggacactttggttgcttccaaatcttagctatcgtaaacagtgctgcaacaaacataggagtgcagatatctcttccgtgtacgtattttcttccttttgggtatatacgtagtagttggattgctggatcatatggtagaccagagatgatagtgggctcacatagctgtttgccttattacattatttatattatgcatactatttatacatatattcacttgtatgctaaattttataatttggaaagtcttttgcattaattcctttagagcagggattttatactgttttcttgattgaaacaaaatgtgctcagtggccaggcgcagtggctcaggcctgtaatcccagcactttgggaggccaaggtgggtggatcacttgaggtcaggagttcaggaccagcctgacatggtgaaaccatgtctctactaaaaatacaaaattagccagctgtggtgatgcacgcctataatccccgctacttgggaggctgaggtgggagaatcacttgaacccaggaggcggaggttgcagtgagccgagatcccgtcattgcactccagcctaggaaacaagagtgaaactccatcacaaaaaaaaaagaggggctcagtaagtattactaaattaaaatttgaaaatcctaaaaaaaacccacaaaaccctgaggggtgattatgtgtaataatacttactatgagtaactactacaaacatgtgactatcttctaagctccaacagcccttaagttctttaaaatagtttttctatttcttagtataaaccaactagtaatgtatgattttcctataaaggagcacatgtagtaaatagcctaggctttatgaactacatagtttccagtgcagctgactcttgatgtagggcatgtggtatgtaaataaatgtacttggctacattccaataacatttatatggacactaacatttgaattgtatataattttcacatgtcactaaacattattcttcttttgatttctttccaaccatttagaaaagtaaaaaccattcttagctcacaggttatagaaaagcaggtggcagcaagccagatttcagccacaaactgtggtttttcagattcctggtataaattatcaggagcttggagccttgatctgtgtgtcattgatttgctctcattctatttttggacacctttattcgttagagttctctttcttttgtgaaactgaagcacgtcctcatgtaacttctacctgtggattctacattgtgccgtctgaagaagaatagcacaaaataccccccacccaccaccttgtcatagcacaggccttcacagggtcgaagaaagcccctctggccctcttggttttctctgctacccagtgttaaactttgtccagatgcttatgtttcctggctgctctcctatttttgctttttaattttctgactattcttcataaaatgaacacaaactaaacaaaagctttaagctactgtccagctaatggacaattcaatctaatttttgtttccaaagatcgttgtatcaagcaacaatgaagtgccattgttggggatatgcattcttgatttattttgctgttttttttttttaataccatgtactccattataaagataacttatttgtaaatgttcagataatcctatcattattttccatgactattagtggtcagttcgtacttataactacacatgcacagttattatttagtacttaatttctataaactatacttaccaaatgtgtttattgagagaaaacaagctatacagaaaaataaagattttaaaaacaaagacagactttagataaaagccataaattcattttcttgtctgagaataagatctagcaaagctaaccagaaaataaattactaagttaaagtagttcataattcactaagttaaaatagcacataatcataaaatgtgctcagtggctggatgcagtggctcacgcctgtaatcccagcactttgggaggccgaggtcatctaaatgactttttttcaatccatttctttccctaagtacacagcggtattaatactgcttctctacttgattgggttatattatgccttattcagttaggtggagtatagaaccacttatgatgatgttaaagagacatgagacgtcagtttgaattgtaagcagcactgtattttccaagagaaaaatacttttatttgtaaaatcgtgatttgttgattttggaaattgtgttcagctgggtaattttaagataaaaatgacttttatcttgtacttaccaggttctgggttgaatgatggacagtggcacgaggttcgcttcctagccaaggaaaattttgctattctcaccatcgatggagatgaagcatcagcagttcgaactaatagtccccttcaagttaaaactggcgagaagtacttttttggaggtaagaatgccattcctttttggttactaatccattgcaaaaaatgaggtttcaaaatgaagtttgattatgaagtatttatatttgactcaactgactcagtagatctcatgacaaaacaaactgtaattccactgagcaaaacaaaaaaagaaaaggaaaaattttatttctttctgatgaagatattaagatgatgtcaccatattcttctggcctaatttaaatcattgaagtataaaaaaggagattctaaattcatcctcataatcctcaaaagtcaggtccttggaatatttgctgttcacctagtgctttgtaactaattattcaaaccttagtgtcttcaaacaaacatttattatctcgcagtttctctggatcaggaattcagtagtaatttgctgagcgagtctttcatgaggttgacgtcaaactgttacttgtggctgcatcattggaagcctcgtctgcttccggtaggtctcacttacctggctgacagttggtgctggctgggatgcctcagttctctgtggcctctgattctgtaatacctttcttcttcaagtagcctctcccgggggtcactgggcagagaaatagagagggaaaaggaaagaaagagaggaggggaggggaaagccagtaagtcaggaagttctccagataaaaactatgagtattttttaaaatataatccaatttagcagtgatatcccatcactactattattttcaacctgtgggaagtgagtcactaaatcccgtccacagttaaaggaaggggatttcacaagggcatgattataaagagccattgattcctgggtgccattttaaaggtgcctaccacagtctaccttacagaagaagacatgttgtcacaaacatcttggttcttaagtaacgaaaagattagtaagaagaagattatcttaatgataaactctatgtgtgaaaaagtgttgtagcaaagacctgtcacattttctaattgaaaaaatgtgtcctgtcagaaaatgatctttttcataactaatacattatgaggacatattttattaaagtgctgggtactttgtttagatcaatacatcttttattagattattgtgtttcctgtcctaaatcacgcaatgtgagatgtaaaaaataaatcacatgcttagaaaaggcttttatttaagctttaaaatctgtatgttacatgtttgcctctgaaaatgtttctatttgtatttacatatctactttgtttaattaaatatatagttatatagctctctctctctctctctctgtgtgtgtgtgtgtgtgtgtgtgtgtgtgtgtgtgtgtgtgtgtgtgtgtgttctagtttttagagtaaggtgacatgagagcagccaccttgtttatctcataccctgctatattcctcaaggtcctagaaaaaatcctggaatgttgtagatgaacaataaatatttatgaaagacttagtaaattctacaaattaagcaagacgtcactttattatgaattgtctagagaggaaacagaggaggccctaggcaatttactgacttgccactgagtttgcagctagcaccttaagttttctgagtcctataccagggcatttctccccatctaattagtgacaagttagagacaaaaatcatgaactagggctctgcttctttaatcttccataatatttgttggaagttaagactacatgatttttaaaagactctcaataaatatttgatgagtagacgaaagtcaaacaagctgtcttatgagtgaatgaactggacatactgatgtgagaaaaaacaactcaatagccaaactggttaccgtccaaaaaaatattcaatatgattggcttatggccaacagttttcattgctatgatcacaaatagatcacagttgtcagtgggaaagctactgataatctctgctgatcccttgactggaatatttttggccatacatgagctccctgaatgcctaaggccagtttttatcgatttcaatctagaggggcgagcacatagctgtaaccacacattcatggcatagagtttataggatatgaggtctttatggtgtgctatttacatcagtttacagattctggtttttgagcccaggagtcaggagaatattgatttcctcttgggtctatggtctgcctttaggatatactgtcagctaatgatcacgatgcttgttttgttatatcgtcattagctgaatcctaagtgtgtaagaatcatgagaagaactcattgccattctggctctcaggccccacctctggaactttgaaattcaagagaatgagaaattgaatacttaaaaacttcaagtgattctgataaacacagtctgagaaacagaattatagattgaccttagccaatttgcacacatgccttttagattctttttgtaaaacatcgtcagtcactgaaaagtttgggatgcatgagaattagctactctcctatagctttgcccccagagggcaaaagaagggaagtcacaggacaagttatgatgcccataaacatatttattaaatgaacaattattaccaagaaagcacagcactgttcataaacattcttctgcaagctcagtgaggtcccagctctctaacttgctgcaccttgaatcaaatgttctcccgaagcagcgacgctgaatggtgggattcagctacacccagagctggtgccaggtgacagaaagcctcctcagcgaatgactggcacaggatcactaagtgatgctaactccagaagcatttctaagaactcaggttacaggcctcgccagaatcttttaccatcttcacacaaggctgggtgtgtctctaaaaggtgttgtggcaaaccacagacccttaatgcctttaagttcactactgatatctcctttctaacatttctttaacatttatgctatctaacagaccactgatttcaccaaagaaaacccagtttggcattcagttcattagaggacttgttgattcagtgaattaagttgatatgggaataaatagtaaaaatctaagagtcaccccctctggtgtgggtgtaccgtttctgcactaaaactcttgacacctcttacttgtggattcctgatcagaagaggaactgcctctggatcgcaactttaactaaaacacaaatgcacacaactctataccatctgtgctgaaaattttaaagtaggattcaaatgttaaaataaacacatcttaagaaatactagtatagtggaaaggagaattgactttgttctaaaacacgagctttggaatcctgcatacctgattttgaatatggctttatcacttaattagtggatcctttaatactgtatcttactttcttcatctattaaatggcaatagaatctgttttctgaacactgtgtggcataaacttaaacctgggatctgaccctaggaaatgctaaatgctgactgactttccaatgcatcttgagcctttcttttaactctgtaagagacagcctcacaaggaacactggagacttcagaccattatttatttaatggcctctcatcaacttctgcaccactcaaagtatttcttccccacactcactgaagaaaagtatttttcctgctcactgaaagcctcaagtaaaggctttcctgccgtcctacactctgttttgtttccaaacccttaaatacgtccacattttgtttcttttgaagttaagtcccggttgtgtagctttctttgcagcccaggctgggccgtttcactccagtgtgcaattttatctctctgtgcttgctccctgctaatgccggcaaagtcttagtcctcctttgtaacatccatgatcagatgatgtttaatcaccaagaattcttttaattttttttttcttggggataagcagacaaagagatccgttatttggcatgtttcttcagtaaagtgtgttttagctgctttaacatgttttattttcctccaactagaatttttttagataacactccattaatgttaataatcaaaagaatgttaaacacaataattaaatttacctattgactgtttacgtggtaataagctttctgatacaggccggaatccatggctatgagacagcagtatgatttttaaatttctaaattttctttgttgtggtcatttttatttcctcttttgttatcattaaaagaaaaaggagctgtgggctgaagaggagagataagaagcttctagagccagtcttactggaagaggagttctaaagaactcaatggggaagcaggcaggtcttaggaaggtaccaaagcaagtggtgaaggcaagagaaaaagaaagcagtggagctggcctgagtttgataggataggatttgtgttaatgaagtttaataagagggcacatctctttccagctcaccagtacataactgtgttggtcagttttggctgctataagagaatactataggttgagtggtctaaacaacataaatatgtttttcatggttcttgaggttgggaagtctaagaccaaggtatcaaaatgcgggcagattccacgtctgctgagggcacataatgagaagctgcagacaaccattttgttattgtatgttctcatcgaagaaaaatagagacagagagagaaagacagagagcacacactcttaagtctcttcttatgagtgcaccagtcccatcataggggctccaccctcatgacctaattagcccccaaaggccccactcctaataccacccacaggggctcggggtttcaatatgtgaattttgagggacacaaacatatagtctataataatggcctctcaatcctcattgaaatagaccatggattttaaatattaggttgtgcaaaaccagttggggtttttgctattgaaagtaaaggcaaaaacgagctaaccagataggtatgtaaatatagatttttatcaagtagttatgttttaaaataattaggggatgtggttatcaggctccttagctatttattataggaaaataccaacactccttcaagcatttggctgcctgaaaatttcttagtgatggaatacactccatgaaaagcctcccagatagtttcccagaaatccttggtttggctcatccatcaaagaatacgaacttgcagcatcccattcagaatccacttgtcagcactgtgaagtatcagctgccttgcttttgtaccaacaggaaatctattgtttagaagtttgttttctagctctttttcattgttctcccaaaaagaaaaataatggaatgagacacattttatcaaatgatataagttagacaatgtgtcatttcaggagtgtgcaaattgaatcctaaacaaactttttgaaggtacgtattgattttctagggatgccgtatcaaagtaccacaaacacggtggcttaaaacaacatagttctattctgtcaatgttctggaggctggaagtctaaaatggaggttcaacaggatcctgaggtgtctgaaggccccaggggaggatccttcaactcctctggcttctggtggttaccagtaatcctcgttattctctggcttatagatacctccctccagtctctgcctccatcttcacatagtctcctcccctttgtgtttccgcatctgaatttccttcctctgataaggacaccactcatgggattaggtatcatcctaatcattatcacctcatcttaacctgattgtatctgtaagaaccctatttcccaataaggccacattcataggtttcacagttaggacttcagtgtatctttttggaggatacaatttagcacatagtaaggtataaatgctttattttacaaccccctctaatgaaaaattagcagacttcctaaaggagattcatacttctaattttatattatctattctcaaagatggctcttatgaagttaaaagtcaaacacatactttgagaaatgtggataactaaaagttagaggcattcaaacaaacaaaaacaaaaagtatcgtgcatagtggataaaaatgtgctggtcataagaatttgatggtcaaatttctgaatgtgattttgtaacctctgcgtaggaccacgtatagaattgcaaggaaaccaattttaaaattctccaagggaatttcatgtccatatgcataagagagagaacttatctctgataaatattggaaagctttgtgtaaaaaaacaaagtgtaaatgataagaaaatgtatcattggtttgaaagcacattctacgtggaactaaccgaatgttgtatcgttacatttgggtccttacacatgtaatgtagagagaagagaacacccagctaagacttggggttagcaaccctcggagcaggattatacttagggacaaggggaaagaatctggcttcattgctttggttgacccgaaaaattttcaggaacaaaggaatttgtaacttgaccttgatatgcagcaccatgggaacctcccactaccaaataaatgaaatcattaaagactttacttgtagatagtaataatactggaaataaaacaaccacacacacacaaagagtgcaattaaaagaagaaaaaaatcttaaatttgctttcatttttccttagaatgtagttccctttccaaaattacatgtatttaagaataaattaagtcatctttttgtcatactgtacttgtcttggaattttgtacgatgggcatctactaaacagtgaagcataagcttaaaaccatagaaatattacaaagtgttcccagagagttgtttacgctaaaacaacatgaaaagttgaagagaacaccactggcaccccatcgatatacattaaatcccttagcagcagtaagaaatgtcctcacatttaacatataaatgctgggcaagtcagctgtcttatatctaaaatcttctcataagaaatgccttcaggccaggcatggtggctcaagcctgtaatcccagcactttgggaggccgaggcgggcagatcacctgaggtcaggccccagcctggccaatatgatgaaaccctatctctactaaaaaaaaccacaaaaattagccaggcatggtggcacacgtgcctgtagtcccagctacttgggaggctgaggcatgagaattgcttgaacccaggaggcagaggttgcagtgagacaggatcacaccactgcactccagcctgggtgacagagcaaaactccataccccacctgcccccccaaaaaaggaaatgccatcaattaaatatggttatttccttcaaaatataagtccttaaactcaaactgtaattagattaatgtttgatttttctctacactggctgaaatagtaaatctttttatcttttttctaggcctgcttttgcaaatgtttttgaattcgctttgatgttttcattcatactgtctgttatagaactaaggcctacattcattcatttatatccaaagagattatgggcaactaacaagtagtagagcttggattaataaatattttctgaaaacctggcattattgttcatgttgaggtagtgaacaaatcaggggaaaaagtgcttgctcttggaagattacattctaggccagatagtaaaccaataacattggttaaatgagtgtatttgggggaaaattaatcagggaggggacaggaagttcttgggaggggattgaggattatctttaaatggccagagaaacctttgattaagaagatagcatttgagcaaacccctcaaaggagtgagaacacacacaccatgagaagatgggagagaagaacactcttggtagaggggaaagcaagtggaacccgatatccagctggtgtgtgcagggagcgattaggaaagggagtcagtgtggctgagaaaaggtgaggttggattgtgaagggtctttaacaatgactgagaaggttggaccgagtgaatctagtttattttaaaacagtctctcaggctgctgttttggtaaaaggctgtagttggatgagggagaacagtggcaactattgcagtaatccagatgaaagaaaatcgactagattgtagcagtggagccagtaggtaatgatcaattctgcatacacatttggaggtccagccagcaggacttgcagacaggtgagatatggggtgtgaaagccaaagggtcaaggatgacaccggtcttcctgacgaaaaggctcatacctcccctttccactgttttacactttctccttcccctttcacaatttgaggtccacttcactgtgtttccctgaaaatgacttttgacctatacatcctaaaactaaggaatttgttctgtatgtggtcatagttccaccaaaattaacggaaccatggacagctccctcccaaacaaaattcccagcgtcctgtctcttctagtttcttttgatgggttctcagtcagttccgaaattcctcagatcaagtcttggctgaatgctctttctgctgcatctagggtcaagaatctactcatctaaaacctgctatggtaaattaaaattccaatcagtctctaatttggggaccttgccatttagaaataagcaaatggagaaccctgacttaaagctaagaagctgttatactaaaaatagcctttaaaaatattgattcacaaataacctcctcaagcatatacttccaccttgaaaataccacctaactgtaatcttttccttttggcctttgttccatcagtgttccaacaatactactggggttggaggggggtagaaagtaaactatttatcgcctcttaaaatctaaactggaaattagctctcatccacatttacatagtgctgaatatccttcattaatgctaaagtacttggttaccctatctcacttttgtgtaatatgcctctctttgaaatgctaatttagtattaaaagcaaaagccaactttttctaaccaaatgactaacaatttattaaattttagagtgagatgaggaaatcacaacttagaaccttagcaatttctgtaagttgttaatggttaatttaatttggcttggctaatattatataattggaaattatttttatttactgcttccaaaccttttagttaacattttgttttatatttttcttagtatttttaatattttccctctggtccattattattatgtgattattttttccacttttttcgtagaggagtttgtcctcccctaattgtagtgagtcacctagaaactctgtgtcaattaacattttaagcagtacctgattatgcaaaaacaactccttgtccttgaaaatattcaaatcaatatttgctattttatgcaatgttcctcattttaaaaaacactttttttaacttttatttttggttcaggggtacatgtatagggttttctatataggtaaattatgtctcatgggggtttgatgtacagattatttcatcacccaggtgtaataagcatagtaccatataagtagtagcttttaatacaaaaaaatttttaagccatcactttctattatgagaatatcaatgagaaaaaaattttcaatctaattcccaaagaactttcaggctttttttatttgtttaccaattatatgcataaaagaaaagagcacaaaaaaaggaattacacattgaaattgaacatattaacctcatcagaaactgtttttccacttggagattggaaagtatttattatgtagcccaagattcccaagacttttttttatagctcccacaagtaaaatttgattagagctatgttttaaactaattatcattacaattattgtgatattctacatgcctttgcctttttctggctcttacaactggcttgcattggaaatactcagatttaaggaatgattacaagaagttttcaaagaaaaatatcataaaatttcaaaaactctttgactttcaagaattggcttaaccctgcggccatttaccattgacatgttctgctttcttttttcttgatactgattttgctcttttaaaatgattagcctaaaagaacatcaagatctgactgtgaaaataatacggataacactaaagataagtaaattaaatattattttgtatgtgaattttttagcaaatatcttctatatctaaaatgctcttaagtagagaaactactggccaaatttttaaaactgtaatgccttgtatatctggtgcaaatatgtgataggtgtcaagtgattacttgggaagcataaataagtctacagtttatcctatgaagttgattttattgtgctttaacaaaaagaaaaagaaatctttaatgtatccttcatgtttcatgaataatcagtgttaaaaaaaattcaaagagacatgttaaaagcatagtaaggaaggctttattcagaaccattgcaatagatacagggaccactgcaatataattttgcagcgaggaagagagattgggctcaactccaagtataggaaggacaagcgggaatttatagcaaaaagcagggttgggtcagtggatagaaaattactacaaagaaacaatccaggagtataggggtttctaaccaaagccacctaaccagaattcttgccaaaaacaggctagagtgatcagacatcatctgtggggtggtgcaggaggaacgtggtcaggtatcaaggatgatgagatactgagaacgatcagctctcaagggcggggagttctggctaaactgacttcgcagggttcttttgctaaaactggattttacaagagagtaaacagatgggcctaggagaaagttcagagcctgattaaaatttggtaaagaaaagaatcttcatcatgggttagttcaggtactctaagaagcagaggttaagacagaatcagacaatcaaaagatttattgggcaagtacttctaaaggaaaaagaggttaaagaggagctctgacattcaagaatggtgaaagggaaggatgagtgagtgggtagggccccagatggttgcacagctgaggcagtattggccagtctctagcaaaaattgtctgttagaatcctgtgtcagaaagaaatggcctggctctcttactcctgctgtgttcagactgagggcagtccaggcagcgtggcctcagctggtaagcatctgtggaccctatttagagcagccaactctgacctcaggtaggaagggaaatgtcaccagggcccttccttagtagccacaagtcatttggtaatgacacaaaaatgcaatacataaaggtagttacaggaagttattttaaagcacttcttgacaaaccagaaagaagtttgtgtttttttttccccaacaaagttgatatttttgtttgcatatctaatactctatgacagaacaagtaggtagaggagatgaatttagcatacttacttttttgaactgctggaaattcaagtaatattcttatatgtacagaaacaaacagaatgggatcccgtgcctataactgtgatggtctgttattgcttattttgtctgcttgcctgttttgtttctcctttaggcaatcaattatttgtatgtaaatttaattattaaatttattattatttacatgtctctcttttaactaaaaagttaagttctttctggttctgtggcttgttttccattgttgagtttttaaaaagatcagattttaaaataagttagtttttctagtttggtttactcacgtagtaattaaatagagcttttgctgaactcacccctccttttatttttaatttctctttctactttgggttccctttgtccatcccagcaaccagatgtttctcaagtaatgaaaaatattttctactcctcctgggaattttattttattttattttttattattattatacttcaagttttagggtacatgtgcacaatgtgcacgttagttacatatgtatacatgtgccatgctggtgtgctgcacccattaactcgtcatttagcattaggtatatctcctaatgctaaccgtcccccctcccccgaccccacaacagtccccagagtgtgatattccccttcctgtgtccatgtgttctcattgttcaattcccacctatgagtgagaacgtgtggtgttcagttttttgtccttgcgatagtttactgagaatgatgatttccaatttcatccatgtccctacaaaggacatgaactcatcattttttatggctgcatagtattccatggtgtatatgtgccacattttcttaatccagtctatcattgttggacatttgggttggttccaagtctttgctattgtgaatagtgctgcaataaacatacgtgtatttgtgtctttataacagcatgatttatagtcctttgggtatctacccagtaataggatggctgggtcaaattgtatttctagttctagatccctgaggaatcgccacactgacttccacaatggttgaactagtttacagtcccaccaacagtgtaaaagtgtttctatttctccacatcctctccagcacctgttgtttcctgagtttttaatgatcgccattctaactggtgtgagatggtatctcattgtggttttgatttgcatttctctgatagccagtgatgatgagcattttttcatgtgtcttttggctgcataaatgtcttcttttgagaagtgtctgttcatgtccttcgcccactttttgatggggttgtttgtttttttcttgtaaatttgtttgagttcattgtagattctggattttagccctttgtcagatgagcaggttgcaaaacttttctcccactttgtaggttcccatcccactctgctggtagtttcttttgctgtgcagaagctctttagtttaattagatcccatttatcaattttggcttttgttgccattgcttttggtgttttagacatgaagtccttgcccatgcctatgtcctgaatggtaatgcctaggttttcttctagggtttttatggttttaggtctaacatttaagtctttaatccatcttgaattaatttttgtgtaaggtgtaaggaagggatccagtttcagctttctacatatggctagccagttttcccagcaccatttattaaatagggaatcctttccccattgcttgtttttctcaggtttgtcaaagatcagatagttgtagatatgcagcgttatttctgagggctctgttctgttccattgatctatatctctgttttggtaccattaccatgctgttttggttactgtagccttgtagtatagcttgaagtcaggtagcgtgatgcctccagctttgttcttttggcttaggactgacttggcgatgcgggctcttttttggttccatatgaactttaaagtagttttttcccattctgtgaagaaagtcattggtagcttgatggggatggcattgaatctataaattaccttgggcagtatggccattttcacgatattgattcttcctacccatgagtatggaatgttcttccatttgtttgtatcctcttttatttcattgagcaggggtttgtagttctccttgaagaggtccttcacgtcccttgtaagttggattcctaagtattttattctgtttgaagcaattgtgaatgggagttcactcatgatttgactctctgtttgtctgttattggtgtataagaatgcatgtgatttttgtacattgattttgtatcctgaaactttgctgagataagaaattttgtaagactttttggctttcaagaccctaaaaatggttgaatatctaatgggaaaatttgaagtgtttttggggaaatttgaagtgtttttaggtataatgtgtgggattgagggtccgggaatttaggccaaagactttcctagtaacatataattcagcctacttcaaaagttagccttaaacttacattgtctttaatacttttccaatcaaaaaaatccccaagcctctctgacatctagatctttctatctcattcactgaagttaaatacaattagtgccaaagttactatggcatcattcctctgtagaacttaatctataataaccagtaagttcactacctcacaattgggaagagagaccttctctgtttttagacacccttattagatcagtatgcaaatataaaatttgagtaaagatattctctgccagcattggactatatggtattatttccaggagaagctacatgcttcaaaaagtcagcaataaaaaaaaaaatcctttaatatctttggaacttttcctattatctatgggctattgaacaaagagatggactcaaggattccatatgtatacatgattttaggtttaatatttaaaataaaagaatatttgaagggcagaaaatacatgtaaagggggaattgcccctagtaaatatatagtcaatgttatatgtagaaaaaaatgttggaagatcaaaagaaggaaaaaattcaattgggctttagggtggaaatgcaagctatcaggctgaatgaagcagacgggtaataaccactatgtaaaagcttagaagaaatagaaatagttctactatttgctagcctagtgcaaaagttgattcgaagagcagtgggcagagattttgtgtgtttgctaagataatacatgtttcataccaggctttcacactttaatgtccttaagaaccttctagggtactttacaaaaaaaaaaaaaaaaaagtctttggctgccttcttagtaaaattctgattcagtaggtatgaggttgggcccagaaatatgcattttaaacagattttctttttttcttatcattttattggccaagaaatcatatgctataaaattcaccatttaaagtgaataacttggtgtgatactccgaatattcacagagtcttgtaactatcaccacaatctaattttcggccattttcatgaccccaaatagaaccccaaaactattagaaatcactctgaattcttccacaaaaccccaaatcgtaggcaaccacggcaaccacgaatctactacttcctgtctctatggatttgtttattctggactttttttttttttttttttttgagacagagtcttgctctgtcccccaggctggagtgcagtggcatgatctcggctcactgcaagctccgcctcccgggttcacgccattctcctgcctcagcctcctgagtagctgggactacaggagcccgccacacgcccggctaattttttgtatttttagtagagatggcgtttaactgtgtcagccatgatggtctcgatctcctgacctctgatccacccgcctcagcctcccaaagtgctgggattacaggcgtgagccaccacacctggccttattctggacattttatataaattgaattgcttaaaaaattatcttttatgactggcttctttcatttagcatgttttcaacctttattcaactgtagtttattcaattcatgtaacagtactttatccctatttattgccaaatatttttacatatatgtatatacatatatgtgtgtatatatatgtgtgtatacatatatatgagacacttattcattcacaagtgatggagttttgggtctttccaccttttggctattatatataatgctgatatgaacattaatttacctatttttgattgcacatatgtttttctttctcttgggtatatacctaggagtggaattgctgtgtcatatgataagtctatgtttattgttttgaaaaattactaaattacttcctgggtgatctcaatgcttgtcattctctctccatactttgagaaacactaatgtaggcaaagatttggggataaaaatgtaggaaaaaaacaaatgtctgttattatcagacatttgttgcactctgataataaaaaccttagatttcatgaaatggagaggaggattagaagagaggcaaagaaagcatcagaaaaataagacactggataatgatgtgaggttagcatcatcaagggacaagttagaaatccacattttaaaaaattaaaacaaaattatagctaagtgattaagtagtataagaaagtttataatgtgtgtttattaaaaggagtgttaagattttatttatgtggagatgatacaataaggttagccctcaatcacttattaaaatcaatttattaagatttaaatacatatagtaaaatttagttacacgaattttgattcatatacttttgaaagaatataaataatggtaacggatcccattgtatgattacagaataaagtagttatatacaagaatgtttattgcaacaacatagtcatcaataactagaaaatgcctaaatgagcaacagcagaaagatgctaaaagatactgtggcaagtctataaaatggagtattatgcagccacccaaagtcgtgattttgaataatattaaatggtatacaaaaaggttaatgacatagtcttattgcaatggggataaaatattttaatacaatacaaatttataattgcattctcctagacctgtctaatattttccatatcagtgaatgtgccattgccctccatccaggataaagaatgactttagtcttagttttatcttaatgcaacaaatccagtccttcacccaatcctatttaagtatttatttattatccataactattcatctcataaatgattttataatccatctgcctctcagctgtttcactgccactgtgataaaccagactaccatattctctctgcaggactgcttaacagttccctgatttatccactgacggtttcagtccattctagttagtcctctttcaatctatcttccactgactttgtcttgccaatttcccctaccctttccaccctcactgacttcctgtttctcttgtgattgcaatacttatttatttgtttagcaatgcaaatttataacctgaattacaaggaccttgcatcgtatggttcctttctgtgttacacacatcattcatcctcacccagccttctgcttctgtgcaccagcatcatgttggccttccttgagctaatagagtgttatgctgcctttgtcacagggatcctacacattctactatttcctctgtctggaatgttcttcagcctaagatgactacttctttctcaaatctcactttaatcaacacttcttcagggaagccttccctttgtctcagcccctggctaaggtcaggttctttagttttgagtatatataatagattataaagatatatgaattagggagattatttgtttaatgtctgcctacctcactgtcgcttaaacttcaaaaaaaggatatatatatatatatgtgtgtgtgtgtgtgtgtgtgtatatgtatatatatgtgtgtgtgtgtgtgcgtgtatatatgtatctcttttttttccttggcttctcttttcctggttttcccttctcttaactttctgctttctacggtttgtctctttcttcttacctagttttgtacccacccattcctcactgtaaaagaaagtaaaacagaattttagcaatactatctctgattcgaagaatgaataattttaatgttctcctttcttttttcgttaaaattttctacagtagccatttgtaggtataaaaccaacatgacaagcacttttatagtactaaaaaataataagtgaaaactacttgaatatatttccatataaaaatgtaaagttcgctgggcgttgtggctcacacctataatcccagcactttgagaagctgaggtaggagaatcacttgagcccaggagttcatgaccagcctgagcaatgtggtgaaaccccatctttgcaaaaaatacaaaaattagctgggcatgggtacgcgcacctgaagtcccagctacttgggaggctgaggcaggagggtctcttgagccttggagtgcagtgatccaagatcgtgccactgcactccagcctggagaacagagcaaccctcttttgtttgtttgtttgtttttttaaagacaaaaattataagacaaaaatttaaagacactgttatactatgcagccataagaaagaatgagctcatgtcctttgcagggacacagatgaagctggaaaacacaggaacagaaaaccaacaccacatgttctcactcataagtgggagttgaacaataagaacacatggacacagggaggggaacatcacacactggggcctatcgggaggtggggggcaaggggagggagagcaataggacaaatacctaaagcatgtggggcttaaaacctagatggcgggttgattggtgcagcaaaccaccatggcacatgtacagctatgtaataaacctgcacgttctgcacatgtatcccagaacttaaagtaaaattaaaaatatatacgtatatatttaaattttcaaaacaggagaaaaatgtttactttagaaaagcatgtctttaattttttctaattttacatagacaagagtttcatgtggtaggaaacaaactagataagataaagggaggtgaaatttgtcaggattatttttaaaaatataagtggataaaagtaatcttctgacatagcacttgtgtttaaatgtacatttgttacttacagttactaataatttattcatgtaacaaaaattgttgaggtttcttcttttttgtcattggtgagtggattttactttccagtatagaatgtccataaacgcaatgtgtccagtaagtttaattttaaaaggctttatattgcatcaataatttcagaattctttaccatacttcttaattctttaaaaacattaagtatatatacatttttattagggaagttaatctcttgtgttatgtcaaagtatataatggtaaatatcaactaaatacattgtttcttttatttttcctttgcacttatatataagtaatgttattttgttttaagacaacagtctcactctgttgcccaggctggagtgcagtggcatgatctcagctcactgcaacctctgcctcccaggttcaagtgatcctcccacctcagcctccctagtagctgggactataggcgtgcaccaccatgcccagttaatttttgtaattttagtagagatgaggtttcaccatgtcggccaggcttgtttagaactcctgagcttaggtaatttgcccacctcggcctcccaaattgctgggattacaggcatgagccgtgacacccagaaatgagtaatgttaaatataggatttctatattgaaaatattatagatataataatattaacttttaagatagagggaaaaaatccaaattattaggatagtcttcagctatataattatagaaatccaacttagtaacgatttaaactggatgaaggggctggtatggcattttgtggtttcacgaagtatgaattctatttcaagcatcagcaaactcttttatatagggtcatatagtaaatattttaagctttttgggccatgtgttctttctcacaactactcaactttgctttgtagcagagaaacagccataggcaatacaaaaataaatgggtatgtttgtattccagtaaaacatttacaaaaacaagtggtggattgcatctagcatgcaacctctaatttaacaagttctaatctatctagattttccaccatctttagtacattgtttctcactcttggtcaagatgtcttccatccccattccatacagcaggaagaaagaagtgaaaagagtcatggagcccctttctttaaggacacttcctgaaagatgctgaagatatttctacacatatcctgtcagccagagcttagtcctgtggctacaactagttgcaaagcaagctgggaaataaaattcttccagacattcatgaatccagtgccccctcccctcaaataaaaggtgcagggagattttttactgaaaagatcatgaaaacagattgtagggaaaactgacagtatgtaccaatattagtacacagaaatacctatattaaccctttttccaatacataggacatttttatgttccttcaagtgagaccttcccaaaatctcataagttattgcatccatctcaaatccatctctgatgatgtacagaactctacgtcaggtcaaggtttcatttcttgtggtagagtagtatataaattaaaaacctgtttactgtgaaatacactcctcttatgaaaataaaagcatgagagacacatagccattgctggtccatagcaattttaaaatcttgctaggcaggaatagcaaagaggctatttttccagtgccttttgtgacccaaagtttcactctcgcagaggtccctatgagaagccatatcgtgatcctatctgagaagggcattctgctttttcctgtctagtgggctgcatgctttcataactgacctcctgctgatacaaattagtgattaaggactgctgaagtcattgaaagggcacaaaactttgcaggccatgcttatggtttccttggcaatgtaagtttctcaaaaatgttatagtcttctaatctattttctttcaggcagttctatgtgcaaataaccacacctaaacatctgttcttgacatagtttaaaacctgttgactattctttttcatacttacctctgtgttctgccaattcccagtggaggtgagccctctaatctgccttcaagagaacttgcacctccctccttttcttctctctgcctttcagctaatgtcaaactaccttgaggtcctgaaaaagaataaacctttagtggacgatgatatcctcaatctgatcactgcaacagtgctgtgccccagtgtctggtagataacccttacctgaaggttatgaaagacatcctggggccacaggcttacttccttctaaagctgcctcttggcagctgtggtttagacttacaccataatgcagtttaggatacagagttattttttatttttttcatttttatttttttaaccctttcaagcttctgaattagggattttccatcattttagactgtcaacataagaagaaagcaccttctacttcacagtagctttactctcatctcagcctttaggctggtgagttctagactaacttcatctctctcctggagactttgctaaacacagcaagaaggagccagtgccagtgcgcaagagcacttgagtctttccaagcatttctcttaacatggaaagtctcagttggcacctaatttgccttccaaagacagcagttgacaatataaccaaatatttagctacggtataacaaagatctcagctttccacagctagagtatcccagtcttcaaggcctggtgtccaccacaggcaattccatatgctttttaggctttgtcacacatagcaccctatttttatgtatagtacaaactatggtatgagtttggattaggttcagcttgagtaacagagactgaaattaacaagatgaagatttcttcctttgttatatgagagaatatagaattagactgttcaaggctaatgcagtgttccatggagtcaggaagctaggctttttccatatttctgctttatatttagtacaagcaaatatcccaaatggcaatttgagtgccagatattacatccaagttctagataggaggaaaaaagcatcaaaagatatggggtgattctcacccttcaaggccactcccctgaaatctcatacaatgtttacgcatgtatcacctcattggctggaacatattaatgtggccacatatagttgcaagggatattggataaccaaatatccaggtaaagatctaagtctatgcaaggggggaaagtaattattgaaggctaattagcatctttgtaatactcctatatttgatattaaacagtttatattatctgtgaatttgattatagtttgtgtgctcaattgtatttaataaagtggcattcaatatttattccctccgtgagcaaatcttgaaaatttgtatacggctgtttaacctaaggatatttttgcatcagtgttcatcaaggatattggtctaaaattctcttttttggttgtgtctctgcccggctttggtatcagaatgatgctggcctcataaaatgagttagggaggattccctctttttctattgattggaatagtttcagaaggaatggtaccagttcctccttgtacctctggtagaattcggctgtgaatccatctggtcctggactctttttggttggtaaactattgattattgccacaatttcagctcctgttattggtctattcagagattcaacttcttcctggattagtcttgggagggtgtatgtgtccaggaatgtatccatttcttctagattttctagtttatttgcgtagaggtgtttgtagtattctctgacggtagtttgtatttctgtgggatcggtggtgatatcccctttatcattttttattgtgtctatttgattcttctctctttttttctttattagtcttgctagcggtctatcaattttgttgatcctttcaaaaaaccagctcctggattcattgattttttgaagggttttttgtgtctctatttccttcagttctgctctgattttagttatttcttgccttctgctagcttttgaatgtgtttgctcttgcttttctagttcttttaattgtgatgttagggtgtcaattttggatctttcctgctttctcttgtgggcatttagtgctataaatttccctctacacactgctttgaatgcgtcccagagattctggtatgttgtgtctttgttctcgttggtttcaaagaacatctgtatttctgccttcatttcgttatgtacccagtagtcattcaggagcaggttgttcagtttccatgtagttgagcggctttgagtgagattcttaatcctgagttctagtttgattgcactgtggtctgagagatagtttgttataatttctgttcttttacatttgctgaggagagctttacttccgactatgtggtcaattttggaataggtgtggtgtggtgctgaaaaaaaatgtatattctgttgatttggggtggagagttctgtagatgtctattaggtccgcttggtgcagagctgagttcaattcctgggtatccttgttgactttctgtctcgttgatctgtctaatgttgacagtggggtgtgagtttggaaaattcatttaaaggagttcatttctttttcaagttttcaattatccatcatcctagcctgaagctttttataacaaattatttagagtagtaaaattagttttttaagcaatagaatattttttaattacgcatttatatctctgttattcccaatcatatttctgttctccacaaacagctttattcaataaatttcttgcctttaatttgagagaaaaatggaccatttcccaaaacattaggatctattaaaaataatgtggatggttatctaagagcttttttttctttagcttagaaagcaaaggattatacatttcttagtttccgtatggcagaactattaggaaaaaaaaaagaaataagatcatgaaggtatagtgtgtagaataggaaattaagaggccagagaaagtatctttggaattaggaagctgtctaagacattgatggcttgaaaagaagtaaggtgtattaggtgaacaactagatcacaaggttcaggagagcaggagctactcttgattttgtttatcccagtacactaaaatataacacagtgtctgatgcatgcaaagcactcattatacatcttttcaatgaattcataaggataattaaccatattttaaaaactattagaaatgtttatattattgtgtcctagaagacaacagtgtgcatgatttaagcatttttattttttgcaatcacgttattaaagaactctaagttgcatcatgccacatcagatatgtaatccattcagccttatgttttcatctctggctgtagcattaaagcttaatttatagaaaggtgtgttctttccctagatatcaacttaaaggttaaagacatactttagaacactttagtctttcctcaataaacatctccagtttttcctcataacaatttcatcaaatctttcttcaacttatttgtatattttaaatttatatggtcccttaaaaaatcacatgctgattttatttttactttttttttctagtttatcatttgtttttcaaagaaaaatatcttttaaactacttgtttaatgttaaacaatgagctgggggggcattttgtttttgtttttgttttaagtactctattaattttcattgccagtgaagacctaactggctaaacaaagatacacctcagcagtattcttgtttgaaacaacatatgtaccaactaggaaaaatgcattgttaaaattcactgcatgcctgtaggtaatggcagaagtgtggaaaggcagcctctgactttttaaaacatccatgtttcaaaataattttaggaaaataaatgtataggcctggcacagtggctcatgcctgtaatcccagcactttggaggctgagacaggtgaatcacttgaggtcaggagttcaagaccagcctggccaatatggtgaaactctgtactaaaaatacaaaaaattagctgggcatggtggcacacgcctgcaatcccagctactcaggaggctgaggcaggagaatcacttgaacccaggaggtggaggttgcagtgagccgagatcgcgccactacactccagtctgggatgggagacagggcaagactccatctcaacaacaacaacaacaacaaaaattagagtatttaaaactaactaaacacaacttatttatagtggtataatatatccatttaatgttttggaatgccatgtctgcctctgtgaaactagactgttgggtttaattatgcggttcttgcttttctgaagaggtgaaagaataaaatatcttggtgggaggaaagtcctagactgagggaaggcatggaaatagtttgctttatttacaaagaactgaaaatgaagcgtaactcctattattgctgtataattattgatttggcttttctttttagccagtcaaatgacagctaagattccctaaataatagtgggaaaaaatatgttagtcacagcttccatctatgtgttgaatacacagaatgtaatgttttcttattgtgattaaacacataaagcataaaagttaccattttaactatatttaagtgtacagtttggtgacattaggtacatttaccttgttatatgaccatcatcactattggtgtcttcaggacttttcgtcatcacaaatgaaaactgctcattaaaaactaactccctatttcttcctcctccagcctccagcctccactaaccagcattctattttcctttttttttgagacagagtcttgctctgtagccctggctggagtgcagtggcacaatctcggctcactgcaagctccacctcctgggttcatgccattctcctgcctcagcctccccagtagctgggacgacaagcgcacgccaccacacccggctaattgcttttgtatttttagtagagatggggtttcaccgtgttagccaggatggtctcgatctcctgacctggtgatccgcccgccttggcctcccaaagtgctgggattacaggcgttagccactgcgcctggacaccagcattctacttgctatctttatgaatttgaatattctaggtaccttatatgagtggaaacatataatgtttgttcttttgtgcctggcttatttcacatcacgtttctttaggatccatatatgttgcagcatatgtcagaattttgattcttttcatggttgaatcgtatttcattgtatgtgtctatcacatcttgtttattcattcatgcatcaatgaacatttgcggtgtttctgctgtttcactattgtgaatgtactaatgatatacaaatatttgtttgagcctctgcttccacttcttttagatatatacccaggagtggaattgctggattacatgttaattctattttaaattttagagggactgcttcactgtttccacagcaatgacacgattttacatcccactagcagtgtacaaaggttctgattgttccacatccttgccaacacttgttattttcaaggttttactttgttttgcttttgtggtaacagctcttctagtgggtgtgaaatggttttctttcacaaatgaggtgaaacgtatagaagtgaatgtttcctgtcctcacttacccttggcttttatacttagcccatttcacatttcacaatgagaccactagactataagttctttgagggtaggaagtatgtctgtcttatttaccagtgcttttcaacttctaatataatgggtacttaatacatgctgaatgggtacatgcataaatacaagaatgtatgacaaaagtaaatgaataaacaaacaaatgagtacatcttagaatccaatagaaagtattgctaatttttcttttgttggtcaggcaagctgaggaaatttctaagcatcataaaaccccaaagctgatatgaaggggcttgttaggtttttctacttaaaaagcatacatgcccacaacagaaatattcattggcttcttactagttctaggaactcttctgagcattttgctgaacttatctcactaatcctcatgatagccctagctgctggctctaccttatgatgtccattgaagagcctccagtgatgtgatttgctaagaatcctcagctcttaagagtccaagtggagattggaatctaggtgtgtctgactctagacactaatctcttttagccagcataatatattgttcaccagaatgcctgcatttcattggcattttcttaattactgaaaagtaattaagaaaaggttaaattgcaatcactgcttttgatattccacaaacatcttacgttaaaatttaatgaaatcaaatagatcagaataaaaaagcaaaatgtcagattagctacattttagaaacctctaaaatgtgggaaagctgttctgcattccttttgtagctgtctgaattttgcaattatgaatgtgcattattttttctcatgttgactttcctcatgttatttataagaacaagagacttacatatagttgagcactttaaaatatctgttctgagcttagtgggacttaagaaaagctctcttccttccacaagtttttccttattgtctccacaagaatacttgaaattctcatatcatgtggtcttttggggtaaggatttaaaagcaggagtgaaaatgcaaatgtcatcccaaagagttgatccattaagccgttatcagccaccaataccttagcaggaattagttgattagaaaccaaagaatctagagagaattaactgtgtaaaaaaaaaatcacatactctagtaggccagaataagctggcacttatacaaacaaaatctagagacaaatttttggaaaaaaaataaaaatagaggtaagttgggacaaaaataacgagcaagtgtcaggttggccgcgaatgacaggaaagaagcaaggtgggctacttcagtcatatttttcttccacatcttcccacaaagaaaatgagtttccaactggaaatgggagaacttggcaagtatcagaaaaaagaaactggaatccacgataaagagggagagagcctctaattgcctgtgaaaggagctctcagcaaaggatgtagatcagtgatacaaattttaacagttaaaaactaaatcatacattctgtgaattcaacaactaatatagctggaggttgtgaccagtacatttgtttgagtgtccaggtcatccagggtcaataaaagtacacagcttctccactactgtagtcacaatggacggttcctcagccacatgtgtgcaaggactgggacgactgaatcgactatttagagggccgaggccagaaactacaggcaagaataagccttccatctctggaaatattataaaattaattcttaaactgataatttatcagcacagtcattaatgaagcaaacgggttgcactaagaataattccagaactaatttcttttaatagaattggtagttggcaagatcaagaggctttcactgacaagtaaaaatcattggagaggaagcccccacccttatacatgcatataccatttgaaataactactataataaaccagcctgcaggcgggtgccatattactcagctctcttggtgcagcagtggttgggaactggagagacacagtaactttaccatgatttttcagcaaggtctttggcaaaatctgtagttgaaccttaaaactctagttaagttaactagcttttccttcagtatgcatttgtaacctcaaattaaatagacacagaccaagaggaaaggtgaaggaatctgctgcttttacaaagcgaaggcacctctcctcatctgtctctaccttgaaactgcaatgaaaaataagacagaaatgggatgagaaaacatgataggatttccagtgactgttgtctggtgattaagggattgagcacccccccacacacacacacacccacgcatatacacacacaggtatgtataccacattctctactaccaccatggataatagagtgaatctgagttcattgaggtgaaggtgggtgaaccatcttttataattcttacacattataaaaatgtataacattcttataagttatacattcttataatttatatatacagtattaaaattgatatacacagtattataatttataattatacattcttgtaatttatatatacattcttataatttataagaatgataaaagatccagttttttatagaataatggtagaagttgtctccaaggctgctttattttaagaagacttactgaatgttgtaagcagctagttggtgtatttgtaacataagatacgattgccagaatcctggcctcatggtgcaggtgtaagcatgtaagtgtgtaagcatctctgcccagggaggaaagtatggaggagggcagagggcatggctctccttcccactcatgaggccttctgacatatcttctccaaactctggaccctagtcttgatatatggttcttacttagtatatctcaattttttttttctttaggcactagttcagatcgccatttatagttcttaatttatgctttacatcttcctctactcttttgttaggtcctttgtcacggtgcacttatgacatagaaatggtcaaccaagaaaagtcttcaagaggcaaccctaagccattactatgattcccttcttatgtaatgtttttaatcagtgattcttctggcataataaatatatttggcctttggctctgactcctggcacagagcccctaagacccttggagcttcctgagtggcaggaatgtcttttattggtcacaaagagtttcttttgatcacatccaacttagggcgaaacccctagaaagcctcaaaatgaggctggtcaccagaaagaccaaatgatgagagggttggaatcttttaccccacctaccaacctcctagaagggaagcagggctggagattaggctctatgaaaattcctgaatgacaagagttgataagcttctgagttgatgaacacacagaggtgctaggttagtggcatccccagagaaggtatagaaactgtgtgcaactactcccccggtgcctcccatcatgccttttcctatgcatttcctccttttacctgttcctgaatgtgtccgttgtgataaaccactagatacaaataaagtaccatcttgagttccctgagatactctagcaaattattgaaccctaggagaggtttgtgagaacccaagatttaaagctggttggtctgaagcattgatgggttggacttatgattggcatctgaattatgattttggaactgagtccttcacctgaagggttttcactaactctgggtagttagtatccaaattgtattgaattgttggataaccagttggtgtgtagaaagttgtagagttgctttactcccaaacttataacatccttctttttgccatcctaattggtatgaacagttttactagttgtacaagtcagtgatcctgttcatcatccttggcttcaccctgaactcctcatcaggtaaaaacctgaacatttggtgtcagaaatgctgtgattagagggatcgttattttccctactctgattataacatcaaactacgcttatcaaatttacagatgacacaaacttggaaggaatatctaaggacattatggaaaggttaaaaaggatttgaagagaaatgaaactatctgtattcaagcttcctttctaccactaactagtgggactcagttttcttataaaagagtaatgtttggccctgggagttgagtaaactgctcatacaactagggactagtgagtgactgaagcataatcagagcctaggtatatttgccttagcttttaaccagaatatcagagtggtccaagcaggaaattatgcacctgaaataaggcaatggcagtgatcatggaaagggatgacacagaaaaagactcaaaggactttgaggtacaatgttccctggtaaaagctaaagagaagggcctgaagaattcaggttgaagccaaggatgataaccaggatcgctggcttggacgactagtagaacggttctatcacttagaatggcaaaaagaaggatgcaaacatttggaagtaaagataaattctattataaatgtcaaaaaggagatttcaacattccttatgtaaacaccttgtatataattgggtaaataggtctaaacttcagaagagataatttgggagcaccaatacagcattagccgtggcaacaatagtcaaaactgtacatatgaatgagagtgcacagaatgaggaaccagcagtaccaaccaagcagtgagggacagcagcattaaggagtggacagaggagacagagacacaaatgagacttagaaaaagcaggtagagggatcggcagagaagcacagggcacggagtctatagaagccaccagaggagagagagagggtcaagcagttgcagaatttggcaaaggaggatataaagactcatcgagattactagaagtgttctccttttggccactggccagaccttgttcacttcttgccccttgttcatctcattgcccatggaactaaccaatgatcagttctcaagacttttccaccagtatcctcactcaggagtgatctcaccagctgcttcagtatctcagaaagttcccctatggtcagctggctttactgttcacaacatgtttcaaaacatgagattgacatgttttaaaaaagctgttctcagctgccctctccttattaaggtataccatgacatggctttggcaatagttaatgcagaaatactaataagaaatgagaacattgttatttgcttcaaggtaaataagagttggcagagtaataaagctgctcaaatacaatgttcggatgatcttacctcacattaatgaagaagggccaagaacacgggaaataatagccgtattttcttctacactggttcaactatatgtactatgatgcgctctattctgggtaccaaacttcaagaaaaataattcatttgaagatacagaaaagagggcaaaacggaaaacattctataagtgtttttgtgtatttgtttttaatgatgaagttatccattatagcaacaagttggacacattttcagaaaggaaggctcctttctgctttcttcatcatttctaaaaatgcggatatttttacttaccactcagaaaatgcctgattaacacctggagaggttcagtactggcaatccaaactgtttagcagggcctcctgggaagagcagagaaaatagctgaaaaaaaagagaaaataattctaatacagtaattatcaggtcgagcatggtggctcatgcctgtaatcccagcactttgggagaccaagacaggataatcacaaactctgaagttcgagaccagcctgaccaacatggtgaaaccccgtctctactaatagtacaagaattagccggctgtggtagtgcacacctgtaatcccagctactcgggaggctgaggcaggggaatcacttgaacctgggaggcagaagctgtagtgagccgaaatcatgccactgcgctccatcctggatgacagaatgagactccacctcaaaaaataataatcatcataattatcaatgtgggttggtttctatttatttatataggtggatttttcataaacagatttggaaaacactggcttaaaaacatgcaattttcatgaagcagggcctcctgcacagtctttaatatacaagggatacattaaatgtgaatgtgcaagggacacagtttctcaaatttatttgaccctttttggactgtcttgaggccatagtgctccccagaacacacattgggaaactgatctaggaagtgaaaagagaagaaggaagtggtagcacaagccaagacagatggaacttgttgactgactgccacataaagttcctgttccagagaaaacagaaggcatagtgatgactacagagagaatactgataaaaggcaaaacttgatggtgagaactctcggcgttctgattcttatctaacacattcacatttttatatttatttccattgatccatggtaaggctaaatgaaaggcactttaggcataataagtaagcattaaaatcataaaatagacaaaaataaaataaaaacttagtatattgtcattgaatgctaacagctacagaatctgaatttgcttgagagctgcatacagaaaatgaatccttttaaacaactttctataataaaagaaccaaaccactattgaagatagtagtaaattttacttaaatttttgaaatatcatacttgttcactttggagagatgactaagtaaatataattgacctagaaataagtacattgggaagttttcatatttttaataatcctatatattttttcaaaacaattggttaatagatttatcctagttcttctttattacctacttagagacctctgtacaaatatgtgcttgttaatcacataaataatgccataagtaatggaaaatgctggtgatttttagcaaatagaaaatagtaaaaatacaggcagtcatggactagagtataggcataactgttaggcacaggtaacaatatttaggacccaagtcatcggtccagggatgtgtggctaagatggaagaggtaaaacagggcccttcacatcaaagcagacttggatccatgatgagacacaattgttttctgtatgccaaagccatgaaaatctttcaagggctcatgtgcttgaattccttgaactcagtttcctgctagaatctctgcatttttcagtcctactcccatcttgactgccatcccaaaggaagatgtgtctaactctggtcctctcaaagctaatgtcttaatccaacacttctattctcccctttggtacatcaatccatcttttgtagttattctatctgcctcctccttcctcttcaacttttaatgggctctgatttccttaacttcacaaatatgcaaataccaaataaaaccccaatcatcccttgactttgccttttcttcacaggaattgcttgtctctttcttcacttagtgggtgaaattattggaaaaataaccaataactgttgactgtagttcttcccttgccatttatttcttagggaagcattctggctcttattatcatctctaataacaacaataatggagtaacaggcacttataaccataaatgcattccatagaagatagaaattgttatacagttggccttttcttctgaaaaatctcagtgggtttggttatgttcttttggagacaagactagaagtgaactgatctgcacaatttggagatcaagaaggtaattctagaggaaaggaatagcagagcacggaagctgagaaggagccagtgagattgagagtagataaccctctctgcagtgtgactcccttactgtcacccctagctgtctagcaaatctaactgaataacatgcataccatgaataagcatgttcgtgtgtgaaaacgagggaagggctagtttttctctcccaggttagtgttggtaaacaaagatacatatagggatattctcattacatatgtctacctcccttactgtgggtcttatttaataaaagaatgtttcttcagcgtttgttatccaaacactcattttattttcacaataatctcacagagtaccacatgctattatccctattctgcagatgaggaaattgaagctcagagagtttaagtggcttgccaaggcctacagaaccagtaagtggcaggaattcatattaccttgtacttagtaggtattcagtttatattaaatttacctagtttgagaggcagcatgcattttagtgaattggattgtgagtatattcatcaactcttgttctatggtaggatactgtcttaaatctaatatacaagcaaggactcatgctgagttaatgcttctaatagaataacctagaaatttattattttactgtggtgctgtcagcactagaaaaactttatttggtttctgtttttctcatttttgctgcaaataaagagaatagcctcaggaaggtgatttgcctgtcatttgatctttatgaagaaattacacataattaacttatttcatttttagtaagctactaattaggtgcttcgttgagattgcaaaggtttaattttctggcttccagcatggaagtaaaaaagaatccactatcatagagaaaacaaaatcatcaggagttcttgagcccccaaagaaaataaatgattgaacaaaagaatagcaatgggaggctttaatctgagcatttaaagagaaacagagacggaggaaatcttgcgatcaaagccaccaaatgaaaagagaaataaattatttatttagcagagggtaacatttttcttcgtgatacttatttttcttagaaatcaaacccatcctctctattgtgtcataatattttagatttcacagcatggattactgtactcttttatttttaaatttagccttattattcccaacaggcaacttaacatttaatatctgaaggtcattgctgtacaaatgtgatgtgaaaaaaaataaaatttagcagctgtatcatattatactaatcagaaaggaaggaaataaagaacaaacagcagtgtaagatggctgcagtgtggatgagtgagatggactaagcaattaagtattttgttgcagagagaatctgactgtgtattgtttttctcaaattttcagcttgtattaggtagagtcaaagagaatatagaagtgttgagaattaggacaaaattcagtttatcttatatgaccttcatttgtggagtaaaaagaacatatttcagaagacagatatgctagctcttgaatactaggtgattttaatagtattatgataattttattagagattatttacaatcaagaacctgagaggtttgctgttgttgttgccattgttgtttttaggaatgttcacagaggtcacattttccaaccttagagttttgctgcttgatttcttttgtatttgtagcttacgtggaagcagcaccatgctcagcacaagaaaagcctttcaacaggagtttaagcacagctatatgcaagtgaaattaaacagaaaacaatcccaatagtcctattcttcataagaccttaagacacttggggtttggtttaatttattgaagtctctcactcttttagcatatgggtgataatagtcaagagaaattatttaccatcatctactgatgaaaatcgtaggtggaagagatcttggaatccttctaggattggtaagaacatgaaggtttggggagatgaaatcttgctaaaattatagaactagttagtggcagagatatgattagagtccaggacattaaatatctagttcagtcctctttccactgttcacctctgagtctctgctccctcaatgctaggacccaactattgattatctcttgatttttaaagtgtaagaccatggtactgtttttcatagccacctacaattctctagaactctatggaaaatttcactggcattttatgataccaaccatggaaattccctctcaattccaaagggacattggcagaattttataattaagggccatgtctagtgttatcagccaagttatgtcccccaccagcttaaatttttttaaccaaaatgtcctctatatactgcaggagatagggaagattatcaattagggaaatggtaagaaaatattaaaacttttatttttataaaatttaccaatatcatgcacccacatcagtccacttgcataagtcaagagtgataaaatatttacacaacaatttcagtgaagcaattttattactcacagataggtagcaaaagacaagggaaggttaggatgtatggtgagccagcccccactaaggcacaggaaaactgccaagggcagatgaagtctcatctgtgcatattctgtgttgcactgcagctgagggccccccaaagcacatactgccctgggttttatacccaggggcaatggaattgctgagctaaagcatttcaggacaccctgttctgggaacaatgggaacagagttccagcctgttccttcatgtcttcaatgttgcatttccaatgtattctacagttactctgagaactacaagtgagaaaggggccatatggggacctgtcctgcagtgctgtgtgtcttctaagttagggtatgcaatataaaaaaaagtttgaacaacaatatcttaaaaccccttttagaaagtcagctgtagtcatgaaaaggagtgattctaaggtctctacaaattgttatcacaaaataccacatagtctccatcacaactccttaggtctctgtaagttgtcatcacaaaacaacaaaaacaaatcctatttgaaccctctgccatttctaggatgagcttgctcattatctctgaagatttacatggagtattcaaagcctgcagggtggctccaattagtatccattttgagcattggaatagaagaaaaataactctagtcatcagtaaaatgtccttaaatagttgacccctgaccttactgataaaatttttaaatctgcatgtcaagagaactgaccttgaccttgacatttgatggggcactgcatctgagtggttagaatttgatttgtggttttatatttagtctggaaaagatgaataggctactgtgttagttagttctcacattgttataaggaaatacctgagactgggtaatttataaagaaaagaggtttaattgactcacagttctgcatggctggggaggcctcaggaaacttacaatcatggtggaagggcaactcttcacagagtggaaggagagagagaatgaatgccagcaggggaaatgccaggtgcttataaccatcagatctcatgagaactcactatcacgagaacagcatgggataaaccacctctatgattcagctaccttgaaattttaaaaacttgaaatttttagcctaagtatttcttttcctcatgtaaaaaattcacagaatcaaataaaattacagtgattgtcttaatcacctttgaagagcaagggcagtctacactgatttttttaaaccaaatatagaacataagaagaaagagtgctctttattttattgtgaagtaaatgccctggtgattgttaataagtcaaagagaagtggttttgtcacagaactgttagaatttaagtagtatattattaaagcctattagatcaccatactccttttcaaatttttaatagtaaggtttcaagtctaatttaaactgaaaacgttacagagaataactaaaacattttaggagacttttttccatactaattagcattttaaatcagcctttcagagtacaggaaaaaaaactccataaaattttatttttattaagtgaaaactaaatattctgccaacacaaatatttgctaatatgtatacacatgtgtatgtagatatataaaaagtttggaaggacaggggccaaacagaaaatgggggtcttgaagagggctgggggtagggggagctcatatttatcatgcttctgtattatttgaatactttttcatgtaccatttacttaattaaaaattaataaaatcatcttaaggtacttgtatctgtattttaaatatatttattcaaatgtattttaaatgctgccttacaagaaatacaaacagcttcatataaacaattctatcatcattgaaatgtctactttgacaaattttgaattcacattcattgtttttaaataagttatattatttgttatttataaacaataactattgctattgctgtggtttggatgtgatttgcttccaaaaaaaatgatattaaaatttaatcccctatacatcagtgttgtgaggtggggcatagtggaagatttttggatccatgggggcagttttctcatgactaggtcaccctcctgtgggggtgtgtggattctgttttgcaggaatggattagttcccataacagtaggtcattataaagaatatgacttcttctttcattatgtgaactctttgtgtatgtcagctcctcttctgctttccaccatgagtggaagcagcacaaggccctcaccagacacagctgcccagtcttgaactttgcagccaccagactccatgagccaaataaacttttccctcataaattactcagcctcaggtattctgttattgcagcactaaacaaactaagacgagtactaaaaataaaatattcataggtgaatattgtaaaaattataaaagaaaaaattaaatattctgtgtatacagaaatctgagtttaatcaaagcaagaattttttttccttcagaatgtaataataatcatttaatgggcttatttccaagttttacttctctaaaatcaaacagtaggtccaatgaatgtaatgtgcttggcatatcctcaaaataaatttgcccatttgagaacatcatagagataatccagtaaattggccaaagaggtcatagtaagtgaaaaggcctaaatttgaactgagtcagcttagcttggaagctcttgctgtctctctcagataaaagctcctgcactgcagtaagcagctgcatctacataagtgccggacttttcatgtccagctaatctaccacattcactctgtcaccaatggcattggacacattctgattccaccctttctgtttcgctttggctaatagatccttttctagcctgcatttacataagagataaagatactatccagtagtaactttaacctgaaggtacagaaaacaattctgtgtgtccattatgtttgaatatcatgtataccctgtcaaagggcagcttcccttactcctaagtttaagggaatctgctcactggtcccctcacatgcaacaaggttgttctcttaatgtatgctagaaaggaaccatattttagcacaaatatgtgtcctttatgtaaaatgtcacacttttaaatcacaaaatacatacccccaagcaactccaatcataggaagctcttctatagatgattttctgtgctttttatttttatattctgtaggaatactctttaaccagataatctcattggttcagccagtacccaggcttctagatgctacatttgcacatactaagcaatttatcttggtcgtggacatgttcaactcatctcctcatagtatcttttgcacttggagaagtaggagctccttgtcaacctctagccattaaagagtcttctgaagtttatcttatatgtcctaaaaacacttatatgtcctaaaaacagtgacatattctgtcattgtaacaaataatggtaattattcattttctttcatatatttaaattgggataaagtttaaactaccatttcacactattttttcaacactctctccacattattgacagttcagctatgatacagtatacaatcactatctttttgactattgtctaaatactgcttgctctgtcagaaatgacctcctatctatctcctgaggttcagtttcaatgcctcacttcctatgaccttactctccccagctctcatcagctgccaccgctagatgctcctccctctaggattccataagaatttgttcatatttctattaacacatttattatactacttgagactagttatagacatgcctgcctcttccagcattgtgtgtttgtgtgtgtgtgtgtgtgtgtatatatatacatatatttatattataaatatagctctagtttctggggagaatatctgctccattgcagccatgtaaaaattgtatgtagacaagaacagaaaaccaaacactgcatgttctcactcataagtgagagtcgaacaatgagaacacatggacacagggaggagaacatcacataccggggcctgtcggtcggtggagggctgggggaggaatagcgttaggagaaatacctaatgtagatgatgggttgatggatgcagcaaaccaacatggcatgtgcatatctatgtaacaaacctgcatgttctacacatgtatcccagaaattaaagtataaaaaaaaaatttaaaaaataataaaaagggaaaaactgtatgtagagtgaataaatagattaaaaatggaattgtctgagaagttggttgaacttcttatgaacttttttcacaacttatttaggttgatacaacatggacttcaagagcctgaggttttagaatcagaaaatatctgatatgagctgagacttttattagcattgagaaattggctaagacttgttaggatgatcttgatcagtatcatctgatgattttttttttaatatacaactcctaccccaaacccaacaaggttctaatctaggctatcacacacacacatacacatacacacacacacacacacacacacacacacacaaatgctacaacacatctaaatataagaaaccatttattcatcttaaaagttgacttacattaatagtaatgcattaagtatatacattaagaactgtcttaatcagtttaggttgctatacattgccatagaccatgaggcttaaacatcaaacatttatttctcacagttgtggaggctataacttcaaaatcagagcaccagcatggtggagttcttgatgagggtactcttcccggtttacagatggccagcttctcactgtgttttcacatgactgagagagactggaagcttgctggcatctcttctactagggacactaaacctgccatgaaggctacactctcataacctaattatatcccaaaggtcccatctccaaatcccatcacatttgggatttcaacatatgaattcagttcatagcaggagcagaatgtaaataatgataatggaacatgcaatatttgctaacttataaggcttctaatgtatctaatttaaagacatatatttgagttttctttgatcaaagaaaaaatatgtctataaatgaatgtcagctataaaaacatttgcttatgatctgtcatttccacttaatgataataatgttacattgcatccatgctgctttttattttcaaggcaatttcacatacattatctgatttttcaactggtggccagtttaatgtcagaaatgtttccaagcttctatttatatttggttgtttaaagaagattctatacttatatgtggttacacatgaaacatacatttacttcagcacaccaaatcagtgaaacccgtagcaatttcagttgtgctcatccaaggacaaaattaggttttaggatttaacccaggtggcataataaaatttaaataacttgtttacctgagagcagcagcaacaaaaagagacaatcagaaatacaagccacaacagaacagtaatgaaatgtgatcctaaaaatattaataagtgttgaccctctgaaataaaataactaagaaaaggaaaaacaaaactaagggtgctcccaaagttgataaacaatgcatgaataaatgagcccctccactgtattccttcctttatatatataatacatatatgtaaaagtgatgtatatatcacttttttcacgggtcataaaatttgtatgttaataatttgcttgtttaccattctaatgtgttaaaaccttatacacctttgattttcccattgattactcttaagcagattaggcaatcaatacatgtttgttgaattgcactgaacttttaagcaagggtaaaatgatgccagctagaagcctatatattgtttcctgaatggtaagcagttcaaccaagaaaaaaaggtgaagcagatcgctttctttgctgctgttattcgtaacagtcgaatacaggttaccgtgtttttttcaatataaaatatggttgtcctagccataatcttggtctcgtgctaaatatattattcatgacatataatgagtagcttactttgtaaagaagatgtagtgatgttagcagtaagagtgaaattggccatttccccctcgtaaagctgtgtcttccccaagcaataaaatatggcttggttaagtggaacatgtggataaaaagatgaattgcccactatcttggagcctcattttaatatttaattttactttgggcacatcctgatacactagagaaagcctttatttacttttattttccagcattcattttgttgctctgaaatataccaagtactttactaagtgttaaattagttttaatattgtgaatataaagttttaattttatgaataagtttatagtactgaaatcactcagtgcggcaatgataatactgatcttggacctgattctcgattctcccttttttggcaaaatatggtgcatgggtgacatgacatttcattaatttccattcaccaggttaattctctattgcttatcttcatgtgagtgtgtgtctctgtgtcactaggaccacataaatgggggcatcaaaactacagaccacaatttcaaactgtccttctaaagtgaccagatttaaagatcaagaccagtcatttggagatgaaatgaagaatgctgataattatttattacctattacctgccaggcatcctatcaaacatatcacatgttctctcatttactcttcaaatcaacactggtgttcatattttgtagatgatttgctgaggctaagggaggttaagcgactctgaaaagataccatagctaaaaaatgtcagagatgagactgagtcccaagactttgtgattttaaagcccatgtcttttccactgactccaaagaatgagcagttgccagtagcgctgatttagaatcatcaagcagtcatgttgtctcaccattttctcccatcacccaaaattctacccacgcagctctgttattttagcaaaagactctaaatgctattaaaatgcagacaagatacagtgaatgataacatttaaagatatttagggtcagtccttttcttcttaggctgaccaaaagctaagaggataaattgaactggctgattaggcagaggtaacactaggaaaaaaaaatgtttagaaaactcgaaagacagattttaactgcttcataatttttctctgggctattgttattgctagtcttcagagaagcttgtgtggcacaaggaatactaagtgaactgaatgatctgaaaggtatatatcaaatgtgctgttaaagggtctttatacatagatggtaaaaccccatgataaaacttttgtagatacttcagcattatgcaaatgattgatcactttatgagacaattttgaataatatgtgtgaaattagttttctcctacttgtcttagttctttaaaggattaacagcatccattattctttgatgttattactgttaatatttttgaaaattagggactttttttaataaacgtacattaggatcaaaatatttcacatatcatctgattcttctgttgacctctaagtgatgatgatgtagttgacagatggtaaccctgcatatccaaatcaacatctctttgttttgtatgtgtcatgtagctttttattttgttactataattaaagtaacaaaattaaagatccaggttattatataaaattttcaggaaactatatgtctttttctagtttgacatgtttgtgtttttatccatttcttggtgtacacataaaatttaagtatgtgccatgggtttatgagccagtactcataatgcatcctgaaattttccagtggcagatataaatacagagctgtcatatttacgctgaattataaaacaactgaaaacaatgaaaactggtatattctgagtgggtggcatgttaaacccacacaattttgtcatgtttacttttatttgtactcgtttgacagcagggagaaagtactctgcttaaatctatttcgataagatagttttaaaactttataactttatgtaaaagcttacataaattccctttgctgttagttgattgaaaatggaattctttagtcacacataggtaattataaaatgaatgtccttccatcaacatatgcttccttgtttggatcaaatatatgtcttcgcatttgtagacattttcccttacttttttgttgaacttgtgaagtgaatgttaagtttatgtattcaattatgtggcgtgttacatacagaagttttctcccaactgcaagactttattttgctgggttaaaacacttggctaacatatggttgccaaagataaggtgcctatttaaaaactgatgttcaaaaaagctggtcagtgatagtttttttctgtttcattaaagacaatacatgctttctactgttttctttttttccttcagcagagttactatagaggaactatattcagattatttgtaatactttggaattacatttaaatttatcactgtatttccatgtttgaatgtcagtgagcatgtaggagcatcacatagttattttgtagcaaggaactagaatctaaccctcaaagagatggcaattttaagcatcctgtgtattcctatatgcttaagctcaagcttaattaattaataggccgcaaacagttaataggttaattttctacccattaattttacgaaatttgaaagaaatatttttgatagctgcaaaacgtattacatttctacaaaggaaaactaaatatgacattgtaaatagtgttccagacttatttttggctgtgtcccataatcgaagattttattttattttattttattttattttttttttttgagacagagtctcgctctgtcgtccaggccggactgcggactgcagtggcgcaatctcggctcactgcaagctccgcttcccgggttcacgccattctcctgcctcagcctcccgagtagctgggactacaggcgcccgccaccgcgcccggctaattttttgtatttttagtagagacggggtttcaccttgttagccaggatggtctcgatctcctgacctcatgatccacccgcctcggcctcccaaagtgctgggattacaggcgtgagccaccgcgcccggcccataatcgaagattttaaagcattaaagtttattcatccctattgtcaatcctattctttctggctatattcatcagtcattgccttttcagtaaaacatattaaacatattaaagggatctgaaaacttacatgcaaatgagttgtgtgaatgtggtgaagagagagttgcaggatgttcagatacaattttttcatgttaattttatctcagaaacttcagggactaccacaatttacacagcaaattttaaaatttatagactgacattttgtttcttctttttatttatttatttaattttcaaccttcaaagagtggatctagactgacctttcaaactttgcgtagtctttttcaaatttatctttcaaactttattttccacttgctccactgctccattgctgtaccattgcttttatcacttttttctcaaacatgttactcttagtcctgtttttacttggttgtagtcactgttattctcctaaaaatcatgcattcattcattatcctattatgaacaaaaaatacacactagtcattgaggatataaaaatgaagaaaacatgaattcctacatggaggagcctattgtttagtggaagagatataattacagaggcaaggcactagggtaaaattatcttatctgttttcagattttgatgatcaacaaatcattggtccttccctataagaataaaggtagctattccacattaaaaaataaatatgagccatttgtggaagtcatcttcccttgatggtgagtgaatgaggagggtagttgtaggtcaatcttggtcagtggacttgtttgcaaccctaaaagagagcttgtgttaggacaaaacacactgaagataatgagtgaagagttgtgaagaatttgaattctatatgatgctgatgggcaccagagactaccttacctctgtatttcctcttatgtgaaaagattatatatatatatatatatgcatatatatatatatgcatatatatatatatatatgcatatatatatatatgcatatatatgtgtgtgtgtgtgtagcgtttattccaatttgtcaaagtattcttttgcttggatccaaaagtttcctaacttacctaagtaccattaaaataatcagatactaccagaagcaacctacagattcaatgcaatctctatcaaaataggaattacattcttcacagaaactgaaaaaaattctaaaatgtgtgtgggatcacaaaaatcccagagtagccaaagcaatcctgagcaaaaagaaaaatgccagaggctttgcgttacctgacctcaaaatataccacaaagctttagtaaccaaaccagcataatactggccttaaaacagatacatggactaataaaacagaatagaaaactcagaaattaatctacatgtctatacagccagctggtttatgacaaacatgccgagaacactcatggggaaagggtagtctcttcaataaatggtgttgggaaaactggatatccatatgcaaaagaatgaaactagacccccacctcacacataatcaactctaaatggatcaaaaacctaaatgtaagacctgaaataataaaactgctagaagaagacatagcggaaatgcttcaggatgtcaatctgggaaaagattttatgaataaggcctcaaacacacagataaataaggaaaatgagattatatcacagcacaaatcttctgcacaacaaaggacataatcaacagagtaaaagcctacagaatggaagaaatattttccatctactcattagaagattaatatccagaatatacaaggaactaaagcatctcaacaacaaaaatatattttaaaatgggcaaatgatctgaatagacatttctcaaaagaagacatacaaatagcaaaaaaaaaaatgaaaaaaaattctcaacattactaattatcaggcaaatacaaatcaaaaatcacaataagttatcgcaccgtcagtaggaggctattatcaaaaagatgaaaaataacaaatgctcacaagtatgaagagaaaagggaactcttatatgctattggtaggaatgtaagctagtacagccactccagaaaaaagtatggaggtcctcaaaaaactacaaatagcactaccatatgatccagcaatcctactaatgggcgtttatccaaaggaaaagaaatcattatagcaaagagatatctacacccccatgtttattgcagcactattcacagtaaccaagacatggaatcaacccaggtatccaacaacagatgaatgagctaaaaaatgcggtatatatacacaatggaatactattcacctattaaaaagaatgaaatcctatcatttgtggcaagatgtatggaactggaagacactgtgtaagtgtcaggaatagaaagttcaccaccacatgttctcactcataagtgcaagcttaaaaatgttgatctcatagaagtgaaaagtaaagcacaggatactagaggctgaaagagtaaaggcaagggaagatagagaaaaatttgctaaaggatacaaaactatagctaggtaggacgagtaaattctggtgttgtataccactgtaggataacaatatttaacaataatacatagtttcaaatagctaaaaagaggatattcaacatttcgacattctcaacacaaaagatgagtttgagaggatgaatacgctaattatcctaatctgaccgttatacattatatgtattgaaacatcactgtgcatttcatgaataggtacacttatttgtcaattaaaagtaaaattttaaaaaaatcagaaatattaaaacaaaagatactattagcagcttaaatatgaagggacctgaattctcaaaaagcaaaagtagataaaactgtgagaatttcaactctaaaaatatacttttcataagttaaacaatatttttccttgtgaatttttaagttcaaataatagtgacataggtgcctgctattttgtagggtgaatttcattaattttatgacacttggattccataataacctgtcaagatagatagaaaaaaatatataacattccaaattaaatgagaaaattgataatcctagaaatgtatgttatttgtaaaaatcaacattatagtgcagatatcccgcatttgattataagaactcttctcatttgtctatctgccatacttcttattggaactcagagctgatataataattctgatggttttaaaactatctgtgaacatatgtactaccctaccatttggtgagtttaaagtttggaaatcattaataaatgatattcccattaacaaaataaacatcactgaagatatatgttgagagatgggaaggagttggtgggtcaagagagacactcttttgtcctttgtccctgtctacaacaccattttgtggtctggctattatttcatagttaccactaccatctggaaagaaagattatcccacatgcctgggctcttaaattattgcaatattttttgcatgaataatgaacaaatttataaattataacatcattcctgttatgtttctaatatgaatgatattcacttgcaagtgtagggcctttgccctgattatagatgttagaaaagaatatgtgagaggtgttatagaaataactgaagtaagaatttacacgtttgttatttagtaaaagtcaatatatttctaaagacttgaataaaacaaatgcaattttgtacagaattcttcagtgcattttctaatttctcctctctgatgtgaaaataacacaagatttagaaatcacctgcaataaaacatgtttatttacaaagtgaaatagtttatgttgtattaacttaaattttcctatttccgatgcccaagtaatacccctctaagcgaatcatgattattgacaagtttacttttatacactttatagtactcatttcccataaataatgtatgattctttaataaaattgataaatattcaactctcaataaggcaaaatcctatgtattcaaaataaaatttaattgaacattaaaattcttgtctagttcccattttgtgtgtgtgtgcacgtgtgacttaggctgtttttcctgacatttgtgaagtcaatgagtttttctgctgtacattagtttctccccttcagtgctgccttacagtaccctattgtataaaatatgcattcagtagagaaaacaatatactgcagacatcagacttaaacaaaacactttttattgttgctttaaaaaccagactttacacccctgcactgaaaataggaactatttgttcctagtccatgtgcctggaccaaagcattttaaagtacctaaaaaaatttaaatttataaattcaggtttataaattgaccttattgaccaatacctataagtccttttaactttagaaaaccctccacaaataacaaatatgatcattttcatttggctatttttaatataaattaattttttcttacagaaaggaatgaaaagttttattaattagagcacttacttaaaccaatgctttcaagcaatctttctttggagtcagtgattatctttggctctataccaaaaacttcaggtattttttcttctttgcagtgttttaaaatgtatttggttgggtaaaagtcactgtttttaggtttcaaaatgtttctacaatatattaagccctgatatatactaatttacctctttatgatttgagtgctagattagttttacacctaataatgtagaaaaaaaatttaagcttataaatttgtatatattatactaatttctgaatataagcacaggtgatagcttattatatttgttcatatgcagctcctggaataatcctagaacaacgcatagtttataaaaaaaatagaaggggagtaggaaggaatgaaaggagagaaaaatagcatctgagcagtctgagaatttcacaataatagctgttctaaagtttagatgactataaattattcttaaacagttatgttttgcctatgtttaatatatataaaacagtagtatttgtatttctgtaattaacatttctctagaaaacagtgttaaatatatatttgttatagtctaaatttgtgttcataacatgtaaattgcaagcatgagtttagaaactcatgattttgccccctcctttaaaaatcagttaatcaataatttgtattgatgcactagaactccaagcaagcgtctcagagtgttctatcacaaagaattattaaaaggaaagcttcaaagctaaatcttcaatggtagctaaagagcagataaagactatatgaatctgattccccaagacaagaagttcttataaattaaaggcaaataggcaagtgattaggtaatatgaacatgtgatttaaggtgaaaatcttctttcaatggccgtgaataaatctcctttaaagacattatattgtgttcactaaattaaaatgtgccaattcttcaatgatcaatggcaatttgttttgctttaattagctgataaaacaaatgaataaatagcatcagctaaggtcatctgttctacctgttgctttaggttaatgtgtatttcatcctcagattccttagctctcagaaatttgactgacatgactcaaggaaataaaaatatttgaaatatgtatataatttataacataatgttagttttatgtaaaagcaattcagcaagtctgaaattacttttctgcaatgactataatgtaacaaatagaaataatttgtaacactgtgttctatgtcaattgtacttaaacacttttgagatatggcagaggatcttgcttccctcaggactaataatgtacacttcatctaagtccaaattttaattaacagttcttgttaagatagttttttctacctctaaacctaatcatacttggtatttaaatggcatattcaataaaagttgtcccatttcacctgttttgaagtcaaaggtttttgctttaaaacatttttgaactagctctacagtttttagaagctgtttagggacttcacatactatatgcaggagtaagtaactaattggtgctatactttatggtattgacacattcaaagaacttcattgattcagtacactttctctttcttaaaaacatgagacccttaaccatggtagaattctcattgttaatttattttggctgctctattgcctgttactaagttattctgtttcaagggcaaaagtatattttttccacatggaaaaaaattcaaaaccaggcagtagatagataaaattattctttgccattagcatgctaaataatagtattgcaaacagcagttcactatgcacagcttgatacgatagatgaaaatattagtttatgaatctgatacttaaactttactaagtaaagttagtaaagtaaacagtctttactaagtaaagactgggttctttaaagcccaacctttggtcttttgaatcgttctctatagcaattagtcactcatataaagtgagatattataaaccgcaactctgtttcagcatgtagaattctttatatatatatatagacacacacacacatgtatatgtatatatacatacatatacgtatatgtacatatatatatgtatatgtatactttaagttctgggatacatgttcagaacgtgcagttttgttacataggtatacacgtgccatggtcgtttgctgcaccaatcaacctgtcacctacattaggtatttctcccaatgttatccctcccctttcccctactccccgacaggccccagtatgtgatgttcccctccctgtgtccatgtgttctcattgttcaactctcacttatgagtgagaacatgtggtgttggttttctgttcctgtgttagtttgctgagaatgatggtttccagcttcatccatgtccctgcaaaggacatgaacccatccttttctatggctgcatagtattccgtggtgtatatgtgccacattttctttatccagtctatcattgatgggcatttgggttggttccaagtctttgctattatgaacagtgctgcagtaaacatatgtgtgtatgcgtctttagagtagaacgatttataatcctttgggtatatacccagtcatgggattgctgggtcaaatggtatttctgggtctagatccttgaggaatggccacaccgtcttccacaatggttgaactaatttacactcccaccaacactgtaaaagcgtttatatttctccacatcttctccagcatctgttgtttcctgacttaatgatcgccattctaactggtgtgagatggtatcttattgtggtttttatttgcatttctctgatgaccagtgatgatgagcttttttcatgtttgttggtcgcaaaaatgtcttcctttgaaaagtgtctgttcatatccttcgcccactttttgatgtttttttttttcttgtaaatttgtttaagttccttgtagattctggatattagctctttatcatatggatagattgcaaaaattttctcccattctgtaggttgcctagtcactctgatgatagtttcttttgctgtgcagaagctttttagtttaattagatcccatttgtcaatgttggcttttgttgccattgctgttggtgttttggtcatgaagtccttgcccatgcctatgtactaaatggtatttcctaggttttcgtctagggtttttatggttttaggtcttatgtttaagtctttaatccatcttgagttaatttttgtataaggtgtaaggaagaggtccagtttcagttttccgcatatggctagccagttttcccaacactatttattaaatagggaatcctttccccattgcttgtttttgtcaggtttgtcaaagatcagattgttctagatgtgtggtgtcatttctgaggcctctgttctgttctattggtctatatctctgttttggtaccagtaccatgctgttttgattactgtagccttgtagtgtagtttgaagccaggtagtgtgatggttacggctttgctctttttgcttagaattgtcttggctacatgggctcttttttggttccatatgaaatttaaagtagttttttctaattctgtgaagaaaatcaatggtagcttgatggggatagcattgaatctgtaaattactttgggcagtatggccatttccacaatattgattcttcctgtgcatgagcatggactgtttttccatttgtttgtttcctctcttatttccttgagcagtggtttgtagctctccttgaagaggtccttcacatcccatgtaagttgtattcctaagtattttattctctttgtagcaattgtgaatgggagtttgctcatgatttggctctctgattgtctattattggtatatagaaatgcttgtgattttgcacactgattttgtaccctgacacttttctgaagttgcttatcatttcaagaagtttttgggctgagacgatggggttttctaatataaaatcatgtcttctgcaaacagagacaacttgacatctggcttgaggagctttaagtgaccagatcatggccattgtttcgagtaaagtggaacccgtatacttgagggacgtggtaagaccaatgactactgggtaaataatgaaactaaggcagaaataaataagttatttgaaaccaatgggaacaaaaacacaatgtaccagaatctctgggacacagctaaagcactgttgagagggaaatttatagcactaagtgcccacaggagaaagcaggaaacatctagaatcggtatcctaacgttacaatttaaggaactagagaagcaagagtaaacaaattcaaaagccagcagaagacaagaaataactaagatcatagcagaactgaaggagatacagatacaaaaaacctttcaaaaaagcacggaatctaggagctgtatttttgaaaagattaacaaaatagatagactgctagtcagattaataaagaagaaaagagagaatcatatagacacaataaaaatgataaaggggatctcaccactgatcccacagaaatacaaactaccatcagagaatactgtaaacacctctatgcaaataaactagaaaatctagaagaaatggataaattcctggacacatacacccacccaagactaaaccaggaagaagtcaaatccctgaatagaccaataacaagttctgaaattgaggcagtaattaatctaccaaccaagaaaagccaaggaccacacgaattcacaaccgaattctaccagaggtacaaagaggagctggtaccattccttctgaaactatcctgaacaatggaaaaagagagactcctccctaactcattttatgaggccagcatcatcctgataccaaaacctggcagagacacaataagaaaagaaaatttcagggcaataaccctgaggaacattgatgcaaaaatcctcaataaaatactagcaaactgaatccagcagcacatcaaaaagcttatccaccatgatcaagtcagcttcatccctgggatgcaaggttggttcaacatatgcaaatcaataaatgtaatccatcacataaacagaaccaaagacaaaaactacatgattatcttaatagatgcagaaaaggcctttgataaaattcaacaccccttcatgctgaaaactctcaataaagtaggtattgatggaaggtatctcaaaataatacctatttatgacaaacccacagccaatatcatattgaatgggcaaaaactggaagcatcccctttgaaaactggcacaagacagggatggcctctctcaccactcctattcaacatagtgttggaagttctggccagggcaatcaggcaagagaaagaaatagcaggtgttccagtaagggaggaagtcagattgtctgtgtttgcagatgacatgattatacatttagaaaaccccattgtcttagcccaaaatctcttaagctggtaagaattctttatttagtatttagtctagttttaagaaagtcttctctcacctaccactattgaagttttatgggaacacaaatgatattatagtctaagtgaaagacatgttcatagtaggcttacaagaaatatttcatgaaaaaacactttgtactgtaaaatttgtacataagccattgaccattttttcatgagggaaaatataatgtcataattcggattggtattttagtgaaatggaaggtcgctgtatggcctcttcctcattcaaagtttgtgaaactctcttctcttttctttgaggctgtgtcttgagcaaagttttactgcaagttggaaccaaactgagatcaaatggccaccagttagtagtgacatctggaaagtcatcttctgtattgggaactcacctaataccacttgaaattatatccttgtctttcattcaaactctgacctccatctttctgattgtaacatagtcatcaaaacctgctaattgctcatcttcttgtaagttatttatgtggatgacctcagcgaatcttctcaaacattctatgaggcaggtactattattattctttctgggtctacccctttgtcctctagctattttttggagagctgataagtgaacttgaaatctgactacagggacttttctaataaccagataactttatttctctcttcttgatatatttgttttctgtgctcctgcatctagactgggtcgtgataaagctgagtccagctgtagggccagacagagccttcctctccacacagcattcttagcattgtggagctcggcttcaggaagcattttccttacttaatagaagctgttgctcctcttcatgggaagtcttggcaatgccagtgatctaaggtgatggaatctgttgatcctacatgcagcagcagtcggtactgaaatgagtaatattttaataatttttttttgccctttcttcttccagttttgctattcaaggtgatgtttcttagtcttctgctccttaattagcacctgttgactaaatggatcaacaaacctatcccacgtgtgacttactctcctggacacgagtcttgttttatagtctagcttagcagacttcccactggtttctgtcatgatactgtccatctagtgaacactttttttgttataatttcctccctctaaacttcatactgttaagtagtttctggagtgcaggatttttttctaaagtcagaacagtgggaaatgagttaataaagcttctacgttccttggaaagacccctgagagatacttaaccagttgcctgctgtgtaaatgttattgagaatgaaaaacaaaaagtaaatttacagcttctgttgtgtccacatccattccaaactagatgcaccataacaaaaataacacttagaactttaattgtagtatctgtgaaaaggcaccagtgtgatttatgtaataaattggatactaaaaactttcttatgatatcatgcatttaaaaattaggaaatgacagccctgaaggtaaatgtaacttgaatgatagcattttcccaaaagaaagcattagttttcaaataagtgtacttttaccaatttaccagtaaacagatcttgtcacagaaatacatacttataaaaactttggacatatttgaaaaataagcagattttcttaaacctcagtttttgggtggtcttattttcctcttctctataagcaaacctttgcccatcaaatagatatgtactttttaatgaaaatatcatatggtaattatattacccataaatttctcctatggaattttctagtaagtaggtgttattgtcacagaaatacttatttgtaaaaacataaagtaaattaatcattatatgctcattgagtaaacatagctgagtaataggttgcagtcatttttaacacaatttaacaaatgtttgaacgatctataatttttattcatgtgtgatttatggcatccattttaactaatgtaaagggtagatgatgaatattagtatcagtcaattccagacttcaaccttaatacacataaaagtgactaccaagcattttctcctaattaaaaaaaaagcaaattttatttattttcaatgaaattttagcttctaatagtcttcaaaagctatgtagttattataataatgttgccattcctcaaaaacattctcaggctgctttggaatcaccttaagcatttatttctgaaaacctattcatgtactccctaagcatagatgaacacaatggcctcatttgttaaagctgtttactccttgtttggtaaagctgagctcacaagtcaaaaccggcctgcagacatacggttttgggcaccatagtgttttctaaagggattttaagaccattaggcacatctagctcaaaggtaattgtcttatacctggcacacttcattttaaacttgcttaatctctagaaacctatgctttagttatccctaaacaagctgaatatttagtttacttttctgcatctcatagtgatgtctaataggcatcaaaatcactcaaaactgtgctcttaatctttgttcataaacctgttctgtttcagttttctccacctctgtaaatggccgctctattccaattactcatactgtaaaacttggagttctctttgactcaatcatcagcaaatcctgttgcctttatcttaaaagtatgagcaaaatctgctacctgctgtcccgagcccctatagctgtcacctcgctttactggcttatcacagtgatctttgaattcatctcccttttccacccttctttgcctatagcctgctctcagcacaatgggcagaatcatccttttttaaaacacaggccagatcattttaccctctccttatgacctttcaatgctccccattttactactaaagaagtcacatccttgaatcagcctttaaagtcctatacaacaggtccttggaatgtttctgacccaccccatgctatttctccttcattgcctctgctttaactgtgctctttgtttagcacactgggaacagtgctgccccaggatctttgcacttcctgttccttctgcctggaatggtcttctcttacttgctcacatggccacttgtctcctcttcttcaaaatattgcccaaatgtcaccttcttgatgaagccttccctgaccgccctaaagtagaaacagcctgccacccacctctctactccctaaccctcttttctactaatttaattattttttcatccaaaactcttacctctcctaatatgatatgttctttattcatttgcttattgttttttataaacaacataaacttgaatataaacttgattataaacgtgaaagttcaaagaattttgtctgtttttttaactgccacatctttggacactgaatgagtacctggcatgcagacacaatcgtatattaaagataggtgtttctttccaaaactcctaacaatcctagaaaactaaaatatacaccactactagtattcaaaacatcttgtttatgcatggcttcaagctttgacctaatttgtttatatatgtccctatattcagttactgttttcataaactttatttataaccccttagctttcatcctgtgtcttcatccttgtggttcagcaatgatatctagtctatatcttggtatataaataatcattgaatttttatgatatttcagtatgttaaggtctcctaaagttgaatattgtaatcttaatcttttatttatcccgtgtctcctgtgattcatatatttgaaagtaaattttaattctttctccaaaagtgtgttgaccataccagtccctatctttaaagacatgagataatttttcaatatttattgtgcatctgtaattgataccattggcttattttcttgattaactcttactactttagatttctctatctaaggcattcatggtgcttttttcactctttatatatcctcagtgtaccacattcctttctaccataaatatttcttttgaaaaaaaaactctctgtaccctctgtagatgtcacactgtgttctttctgatgtctccatgacccctatgtgttcatggatatttattaattttatatagtgactggacactccagtgaattctcaccagccatttcgaccccccacctgccattccaactccccatccctaaatgaaatcagcagagagaagattaaggccaaggcaacaaaattatatgaaaaggtatgtaggtggtcgcagaaggggtcagagaaggtaagtggtttccttgaacattaccaatgggttggattcatccattagaaggattttcaactgaaggtcatgaagcccaaaacaacaaccaaaggttatattataccaatgaagggtgtaagagttcacagacataaaggctggagattgtagaaagccaagaaaagtcaaagtgctggaacttatcatttaaagaaaaaaacctaaaatatagaaaaccaaaaaagattaactaaataatctggaagtccaaggacaagagctacacagtgcaaatgaatttggaaagcaattatgaaaaactttcctttaggatgtatgatcttcttgagagctgtatactcttttacctattctgaaaagtaccttaagctagcagagtccatgattttctgacaacaatgaattttatacattcttgctatatgaacactaataatataatgttaggttattcagttttgtgtgcatgctttgcaattttcaacaagatgttccattattcgatctgtctatcttgttcttgcttactcagagatttctaggaatgcaatctataccctgtataatttaacttttaagtcacgttgtgttagacaagagttatgccttatcttctcactaataataaagtgtcctaggattaattttattatttagtgcatagttccctagttgtatatattacttcacaaaaaacaacctcaaacttattgagtaagatagtcttattgagtaagataaacttacttattgagtaagataaacttgaatataaacttgattataaatttgaaagttcaaagaattttgtctgttttttttaactgccacatcttgagtaagataaacttactcaataagataagatagtcttattgagtaagataaacttattgagtaagatagtcaccttttttatttttaacaatgacatattgatgagtcaggaatttagacccagaatattgaggatggctcttctctactgcatgatatcagatggctaagggggtaactcaaaattctcaagagctggagctggaatcacctgacagcttcttcacttctgtgtttgacactgagactgggaaaggtgaaggatgcattcggctggaacagtgggcctgagccctcacctgtggcccttccaactagagagtctcaggctggttaagtattttatataacagtgcagggctccaagattgagtgttttcagtaaaggagtaagctttgttatggtttgttttgagactaggtctcgctctgtcacccaggctggagtgcagtggtgcgatcacagctcactacagcctcaaattcctgaactcaaacaatctttccacctcagcctttcaagtagcggggattacagttgcatgccaccacaccagctaatttttctcttactcttagtagagacaagatctcactctgttgcccaggctggtctcagactcctgagcccaagagatcctcctgcctcggccacacaaagtgctcggattacaggcatgagccaccacttctggcctaagctgtattatcttttatgtcctagccttagacatcacataatgtcacttccaccatgatctgtcagtcacagtaatcataaacattctcagattccaggggaagagttgtagactgggatggatattgaggcatttgtagctataatttagaactgccacctcacctacaggcatactgactgaatgttctttactcctattccttatgttatctttaactattacagtagttgctgagtgttatggagtgcatatctgtgtcccttcaaaaacgtcataaaacgcatacccaaggtgaagccaactctaaaactgcctgtcctagatacagtttttggaaacatggcattggagaattgagcctaaatggataaagaattactggcataatttttgtatatttccctaaggccctataaatactataaaatgaaatacagaagttaataaaaaaaattaaaaaaatcaagagtcaattgagttggaaatgacttcaagacagagttgataacaatatatgctttatcaaagagtctattcagtgatgactgaatcagatttatactgatccatgaatttgaggtacaatcaagatgaaaccctcacctccaatgggtcagtgggtctgaaccttcacctgtggctcaggtgatagcatccaacgggatgctaatacgtggtgggacctttggaaggaaattagattcagatgatatcatgagagtgtggtcctcatgatgggattagcactcctataaaaagagaaggagactagagcttactctctgctgtgtgaggatatggtgagaagatactgtcaacaagccggaatgcaggccctctcctgacactggatctgccactgccttgatcttggattccccaactctgaactgtgaaaaaggaatgttattgtttaattcattaactctatggtatttcttcatagcagctcaaactaagacacctatttgtaaagagaatgtgactgttatttgtcaccccgtataaagacagttacacagtttaatgattatttccatatttttctaactgcacattagctgaggcataatttttcttgtacacattcttttttaaaaatgttctctttattctgatcatacctcaaattcatggatctgtataaatctgtatgattcagtcatcaccaaatagactctttgataaagcatatattgctatcaactcagtcttggagtcatttccaattcaattgcctcttgattttttgtatgttttctattaacttctcattttattgtatggcatttatagggccttagggaaatatacaaaaaaagtaattatgccagtaattctttatctatttaggctcaattctccaatgccatgttttcaaaaactacatctagcacatgcagttttagagttggtttcaccttggatatacctttcatgacattgaaattatataaatctttaaataagctttttgtgttatatagacctcgcttgtttctgtcaacagttggcgtatgctagtttgacccctacattgtccaagttattaaataacttgtagaagatcactgaatagaatacatgcttgtagaaaagaaatgcacatcaagtaagattctagtagtttttctttcccttatggttaacagattttaagatattatctctcatcaaataatcatgttgagagcttacattatctttttatattatctctttctatttgcttacataagctagtctacatgctgctaagaagaatgtggataaaagatccaaaatacttggtaataagtattcattggaaatgagtgtcactgtgtaatattgccaactttttctagttttgttatttccatgtacacactgaacacttagaaaattatatgtgtaactttaagtatttgttcacatatcattacatacatatacaattgtatatcagctgtcaacctgctatgatgttttctggtgttaaaagggactcagtttcttctatgtcatgtgaagaaacatgctgtcatccatcagactgttttacatttacataataaatcatgaaattccagacagtgttcactcatttatggttggtcattccttgatgttaatggaagacaaggcttatgagaatatttcacttctttaagttctgttggttaaaaatattcctaaccagcggatcacaaggtcaggagattgagaccatcctggctaacacggtgaaaccccgtctctgctaaaaatacaaaaaattagccgggaatggtggcgggcacctgtagtcccagctactcgggaggctgaggcaggagaatggcgtgaactcgggaggcggagcttgcggtgagccgagatcgcgccactgcactccagcctgggcgacggagtgagactcagtctcgggaaaaaaaaaaaaaattcctagccatgttaaaaattactttggcgttttaaaaatgtttaattttgatatactatgtcacaggaacaaagagtttataaaagaatttgtatttttttaagtaaaagaacccttataaccaagagccaattagagatgttcttctagcagcatatagactatgtaagctagtgtgaatttgggatattttttgtcattctttaatttctattctttacttagtttttcctgtttttaaaacttatatgaataggccgagtgcagtggctcatgcctgtaatcccagcacttgaggaggcagaggcaggcgaatcacctgaggtcaggagtttgagacaagcctggccaacatggtgaaaccccgtctctactacaaatacagaaattagccaggtgtggtggcgggtacctgtaatcccagctcgaacccaggaggcggaggttgcagtgagacgagaccaggccattgcactccagcctgggcagcagaggagagacactctatctcaaaaagaaaaaaaaaaaaaaaaaaaaaaaaacaaagaaacttatatgaatagaaatataaagtcgttcctattgtttctggctattgtcacacattatctttgtcagatgaatgtttgaattaattaataaatattttctactattctatttcccccatctttttgaatgttataacttcactttctattattttagtggttaccctaaaaattaaaacatggatatttaatatgtcaaaacattatcagtctctttactcacctcttagatatttcaagaactttaaaacactttctagatttacattatagtgtaaaatatatattctagatttttagtcttacaaagttatatttcctattttataattatttgttcatttctatcaacatagtcacccactgtttcccattgcttctagaatctcagaaggaaacaaaatcctttagaatttcctctacttaatgtttcttgatttttgtttgtctggaaatacattataatctgttgctgattttcctagttcttgaattatttgccagtctgttctgctggctttcattctctttccttaaatagttggccgttttttattcggcactgattatgatgctgaaataattatttgtgtgaattctttgaagtctatggtgaaggtcctttccttcatcaagaattttcattagattctcctgggtacctggactcacagtcattattttagatgcaaatagcataatagtcttaaggctattcaggcgtgctgttctttgtagatattatatcacaatctgtacttttatcccattcattagatttccaaaattttacataaagttcataggattctcattagctttttaatctggaatgaatctaaagttttgcctccacttgagccttctccatttttttctttatctgtctcaatggagatttgtcttatctttccagagaatatgttcttagactcactcattcctctcatcagttttctattttagtagactgtaatttttttcataattttcataaaatctaattttctcataatttccttttctctgccttctttgtattacctttcctttatttcagtagagtataaattttttcataaaatctaattctttcatagtttccttctctctgccttctttgtattgacttttcatttttgttacttcttaagatgaattctcaactgatactatattctttatttttagtataagtaaaacaataaatttcacttaaatcttctcttccgttgcatctcacaagttttgttatgcagtactttcattattgtttagttatgttcagtatcttttgatatccacaatcaagttttattagtccaggtatgtttttaagtgattttttacgaatttgttgcacgcacacacacacacacacacacacacacacaccccaatgtttattagtgatttctaatataattgcattataatcagagatattcttagacattttagagactcgcaatataatttattatatatccactttcgtaaaagttccatattttctggagcggactgtatatttcctaattgtcggccaaagaattatttatatatctttagatctcaaaagtttaggtgtgaagtttattttttattgtaggatcaaacaagttaatttagttcacaaccagcctggatgacatagtgagacccggtgtatacaaaaagcaccaaaacaaacacacaaaagataatttaacatggtgaccactctccaatgcattgttttaattagtttttcttaaaaaccaactttctcctgttgctttatttttgtaaatgtctttattgaagagaggcacatcagcaaggaaatagggccacatcctattggagggaattccgagttctaaaatgcacctctacattggcagagaaatgacaaccagttaatgaaaacgagtgtttggcagctgttgtctcctttgcctgaggccgttctctagtgtcacagcagggtaaagatgtgtgaaaagttgtatgaccagatggccatgagatccagaatgcctagaaataaaagttctaattgattctgcaaaagagaacttttaaaattgctataaggctagtcccagcatgatccagtacatgattaaagaacataataatattaaataacagcaaaactcaaagcaggaagaaagattgtcccatgctatcatgtgactcatccacacaacagaaaaggcaaaacacactcagcaaatggaagaatttaccacccttattctggccactcatcacctaaatgaacctaagccattccatctcaggactgtgccagttatcacacttccggctccagttaagagaatggtgggcaaacactggttaaacaatagagggtttttgtaaattatcatttttaaaaaattttatgagaagcctgaaaagtgggaatcctagatttggttaatgccatggaccattggtgttagacactttacttttcactctaccatctgtaatgggctaacctttgcggtcaggtccttccaggcatggttgatctcacatagccacatacaaggatgaggaaaagcctttctttctttctctctctctctctgtctctctctctcccccccctccccctcctcctctgtccccctccctccctcccttcctctctctttctctccctcctttcctctctctctctgtcacacacacacacacacacacacacacacacacacaaatatacaccatcagtgagaagtatcatgccagaatccctaacagattttattttggatcttattagtcaggattagtcaccatgtgctagctacatagaagcctgggcagggaagtctgtgacaggttcagggtcattctggacagctggtcaactctctaagcacagaaggaggtagaggacaattgagtagggcatccctgaggatattctgaagaatgtcagttgagttgtgttgggtttggttttctgtctccctgcaaacagtggcaagcctggaaacttgctttagctcttaaatagtacttttgtacttacttgaaatatagagtgtctaatattttgaggcatttcaatgatggcagccttgttctgtagatgttacagagagataatgaaacactcccactgcttggttcctgtccttttcctctgcccacggcccggtcagagctggaagggtcagtctgagagcaggagcagctctggctactgcaacctttgggcaaatcacttaacctttttaacatggaagtcttcattaaaataagggcatgcatgtatcaagggcattgtttgacttatgtgattatctcgcagttgcttttgccaatcacatctttctaaatacaaaagagttcctcttattgctgaagcacccagctaaaacagagttggtatttctcacaactcattcagtgtaattaaaaacaattaatagatacctactatgtataagatgccaacatgaatagatcatagttcctttccttggggacccacagtagagatacagttattgaaatgtaaatcaatacattaaaatgcaaaacttgtggaaggcagagaagtagcagaaaggagggatgctttgctgaaattaggtcacaagtagtaacttgctgagtttaaggacttttggactatggtctatacaacggaaaaaagtatgggagactttgaatactttctaaccacgttaaatactttataaccaggttattttatagacacaaagtaaaggatattttataaccatgttagaacttgaaaaagcacttgctattttggatttagtttattccttcttcttttgtgactctttatttccagcatcgtattggatatcttctcatgaagatggcataggcctttcaaactgaccatgtccagaaccaaactcattctctgtctcccccaagctaaacgtgtctcatttgtttttggtgcaagttactgacatgaccatgaacacagtcaccaaatagaaactaaggtttgttcatgagacttccctcttcctctcctactacacacatccaccagcatgtacgatgaattctatagtaaatcatttctcaaaatcgtttctgacttttctttctcgctcccttactctaagtcaagaatcagcagtctgtttttccataaagggcctaataaatattctcagttttggaggccatatggtctctgtcaaaattactcacctctgccattgtagcacagaagcagtcgtagacaatatgtaaatgagggaacatactcctgttcctcaaagttattatttctaacaacagattgcacttggcttaagggtcatagtttgcccatgcctgattgaggccctcctcaactttcacctggattaatattgcagcatatctctaattggtcttccaggctttaattctgctctacaatctcgcctttgtatttacctgcataaataacaaatcgaattcatactgtctgtatgaaaagaaatcattgcccataagaaagtgatatttcctagcttgtcacacgtggtcggtccttgcggacttagattcgtgtggctctttgtggcttcctgttccagcccttgttgcttcctgtagtcctcagaaattctgtcccttgcctctccccaaacacagtaacatcttccgtatttcctacatggttgcagttgtcacctcagtgtatgggtcactcacttatatgtgcatactctgtgtgcatgagagtgtgtgcgatttgctacagattttaattaaaaatattatagtcatatgcatgattatatttgtgtgtacttaaatatatatggaagaaatggacaatgacgtgtccatgacaacagagatactgtttccgtgcatctgtatttgataaattcttagtcatcttttaagacagagctattttgtgaagccacaccacacgtccttggggcagtcattgtctctctgagcaccctttgcacatcagtcgtttcttgtctatcacttgcagtggtgtgctggagcttgcttagactggctcaagaaaactgatggttaaattttcaggaattccgtgagtcgcttgttaaattgttgtaacttgaaattaaccatgatgggagtatctacaatagcagatgctacaaaccaggatgtgtttttagggtttattttgttggagaactggttgaccagcacaccactgaatctttccttttctgatcgacaactatgtaagacaatatgcctaatagatacccaatatatagatacataataacccttaatccttagtatgttttagatgactcagtagacttcctgactactgtctttaccaatgttctattagatgagatcaaaagatgcatctttacattgaatttgattttagtagagagaatcacttatttttttaattagaaattaagctgcatttagaaagttaaaaaataatgattactgattttacatttaagtcaactttcaatatgcttagtattaccaattgttactttaataaggtgtttttctgggaacattgcttataaaatactatttatatgtttttgtttgtttagctccaatatcaaagagaaatagctatattgcatgtgctataactgactgtcaatgaatgggtaatttaaaatagcctcagatgcctcaaaccttaacgctaaattcacctcacaaagggaatttattcaatccaaacgccctcctattgcttaaatgaagacattgatatgaagattcatatctgaagttaagatattagtaaatcaaacaatgtaaaattcacgaccatatatatcatacggatttggaattagctgagtgatctacttttgtatatttttgtggttaaatttaagcactatacatttatgagaatgattttctaagaagaaaccccatttattttctaagaaattgcagcctacctttctatgctggtttgttttatgtactactattgacttttcttcagttttatataagatacacagcctagtgaataataaaaaagtattattacatttactttaactcttagcctttgctttgactgcacagaaggagacctttaatttttatatgctttgaaattcatgaaaattgacatttttgcctgacaacttatttctccactttcatatgcctttcctcttgactgaatttagtcttttgtagtgttgcagaggctgtagattaccaagttctcctagattcacagggcagtaactataggcttgaagaacattcaccactaaacctgagtgaggctcattcgatgttgtaagaaatagagggctcatttgttccctctgacagcctctccaggggtgctcacttatgtgtacatgcactatgtatacatgtcctatgtgtatgtatgagagtgtgtgcattttgttatgcattttaataaaatatagtcatatatattattatagatgtgtatatacataaatacatatggaggaaatggacaatggtatgttgtaatgttcagaaatgaacaaggtgatgtaaacactgtccctaaatcttgtttcacagtagagtttccagtagatgacaagtacggtagccaccacaaagggctgtgagagagagggtgcatctctccaaaacaagtattccccacaacacagtgacagtaggctaaaacatttcgaatattttccctgcctgcttagagaaagcatagggctcaggctgtcattccatgttacagtaacagttctcgtttaaattcattaataaacaagcactcttctaaacttagctaatgtgctcttactcctgaaagataaagaaatccagttttgggatgctgacaaagtgagtcttctgagcctattagagtaaaaacagcttaccctagtgtaaggcaactataactgtaagatcatgaatgttctcgagagaccacttaaggacagacacaggctattctgggcatattttaatgtcctttttggcctttctattttaaaacatttcatctttcttgtgtgtggctcctatcattgctttcctaagtttaagttggtatattcaactgttcattcctgaactctatcccaggaacttttttctcccactcttaacagaagtcaagagacataggtcaattttctgtaatttagtaagtaattcagtagcactcaatactcagtatcatcatttatacattataaccattataacatttattctgcacatctaagtttgctttgaatgacagaattaatactaagagaccttgtctcccttgaaaattgatgggaaggaagctttagccagataaatacttttttaaaaaaaaatgtcatcaagtgagagagcctgaaccacaatcccaatgggatcagaacacttgagtcaattagccaagactccacctacctgtgcactagtgatggcccagccaatggaaacccactacttaacatcctggcaaagctccctgtctatgggcactgcttaactgggccatatcctcacttcctctctgtctcccctttctttttatgctttctttgctgaccaagcccctgttcacattctttcctatatttgttaatatattccatcacattattaaaatctaactgatcgtaccgtccagggacacatcgtgtccctcgaagacttgactctattctaacccgttattgttaaaattaactttcaaagggcaattagcatttgtaatttcatgaggaatagtcaaatagcctgaaagtaatatcaacaggctctctctatttagaggggcctcactgagaaaaggtaaagaatttcccgttttaacccatgatggtgtttgtaacctagaatgccatttttacagcattcaaaatggccagtttcaaggtggctgacgtggtttcggtgattcatattatcaaaaaatgtctgtcttactagatttttttaaccagaagttgatgtagttttaaattttttaaactgccatttactatgaattttaggtaggtgcacaaataacctacagctttgaactttctgaagtaatattttcatactttttacttcaaatgtagaataattttttactggttaaattattttgacagcttaaacccaatgaaagagtatatgtgtatatatttatgagaacattgaaatactgtttgagagtaattatttataacagagacttctggatttgacaaatgttatcattgtcttgagaactgtttctagttgtaaacagtaaatagataatactgtggtcagaaactttcctggaatttagtagtgtttgtatgaactgtataccactgagaaccagagcagggagaactttagtttattatacttgagttctgttttttctgtttgttttttgcttgttggtttggtttggctttcatcttgtaaatagtaaataattatatttcatctagcacatttttatgtatagaagatatacattggagatggaataaaaatataaactgccaatattttacttatacttttgaaaagatgacttgttacagataaatttatcaggaaaaaaaaagcaaacatagactgcaaatccctttgttttatgtgtcttcctaacagatgatgggagtttagtctaaagaatagaaagccatacggacaataaaactcattcacagagatgaatctcgaatatttcaataatattgcatttggattggaaactgtaaacaaaccttcagactgcaattcaaattttacttttattttttttcttacttaaacatatgtacattatattcctatttctcaaaaatatgactaggaaggtaaaaagcaactaacgttatagccttcttataaagaaatttggccctttatgagttcaactaaatagctaaatgtctacttttctatttgtaacatgtttttttcactgttaccagtaaaaagtcatttatttataggcctctttagatatttgtatttttcttcaaccacaatttaaacattcatcttcaaatcttgcctaccattgcatttatttgaaatcgacacttgtgttttagttcatttttaataatctgaaccaaggcttctgaatcatttatccatatggttacatagtctaggttatcaatgcctgtgcatatcatactgtaaagtgctttgaagatgtgttcatctctaggtgaagcttgttggctgatggatttattaaatgatttgtgacatagcatatcccttgttctacccccaaagtcttccattgagacagtatgcttcctccagaggaggagccggtagtctctggctatattctggaaacataggaaaagaggaatttcccttttttcttttgaggggcccttttcctggtgttgccttaaaatatttttgtcacgtcattttcctcagtagcagtgagcgttactgggtcagagtgttactatacactcagtaatttcacacatatttactcagttcatccttgatatgatttggctctgtgtccccacccaaatctcatctcaaattataatccccacaggttgagggaaggacctggtgaaaggtgattggatcatgggggcagtttccccgatgctgttctcatgatagtgagttctcatgagatctgatggttttatcagtggtggttttccttcttgctctctctcacctgccaccatgtaagacgtgtctgcttccccttccaccatgattataagtttcctgaggcctcctcagccatgtggaactgtaagtcaattaaacctctttcctttacaaattacccagtctctggcagttcttcatggctgtatgagaatgaactaatacaatcctcatgatgatattatgaaatagatactattattttctctatttaagagatgatgacaaactgtgagtcacaatttttaagtaactcagtaacacaactggtgtgatttgtgttactgcaaattactgtctgttttacagtaacattggtaattatgccattttcaccccgacacaatttcaaacacacccttccccaccaaaaactgaatccaattgagattcccagttgcagattctctgataattactcttgcaatcttttagggaggaacagaaggttacatggctgccttgagtggtgtagggggccccagccaatctccaagttttatcttctataccttacattctgccgcttttcatgatacattctgcctcttgattttgagcctttctggcattgagtggtgtagctcacctcgcacagatacctctccccacaagtactaaagtagtttttcaccatttccattttcacttctcatggacttcattatctttaaaaacttcattgaaatctctcacccaacagttgtactcatatttcgttgacgtttcagcctttatactttttaaaaatcagttcactcttactttggtgagttttcagaggcagaggaagcagaactataatcaactaatcaagcccctttgagccagcagttcttccaggtttgtgattcacagataccctggaagaattgatgaaggcttctatcatctcccctagaaatgtgaagacacaagatattctgtatgacattggggctgaggatagcttttgtggttgggaagaagtatgataatgtgtggagttttcccacatatatttaggaactttactcttttattaaaaaacaaattaaaagttgcatctgttaaattttctcttacaaaaacatttatggattcatcattaaacatacatgttttggaagcttagtatttatcacgtttgtatgataactcggtagtgagagcacagagggcagtcccagtgttcagagagtttatggcagatagtcgaaggagagaaatgaggaacaaggaagtataactgtgtgacaggagactatcatacaacttatgccctgggtgctactgaagcactgaggggagggacctagcatttggagtaagaaacagtcatcagggaaggtttcatcgaggaagtagggttcatatgttttgaaaatgttatctatttgaacactctgttatcaggtacagacatatttagaatttttctaacttgtagtgaattttaccttttttcattgtatactaaccttccttatctctcagagcgcctttttccttgtgttgtcttaaaatattttttgacacctcatttttctcagtatcagtgagttctctgtgcttcagagtgttattctatgctcaataatttcacgtgtatttactcagttcatcctcataataatactatgagatacaaaccattatttcctctattttagaggtaagaaaaaacatgatgcacaataacttaataacacaactggggcaataaataggatcaaattcagacaccagcaccttgaagcctgaacctctccacacagtaacactactgtatattacaaatgatctcaatacgtttatactatagcactaagattggtatatgattgtaaccatactaattttctttttcttaaaaaagttgtatttgccttagttacctttctcaattcttttactttcaaattttcttagttcctgtgtgttagacatgcttctcagaaatagtattttgctagatttaagaaaaaatcaatagttctgtcttttcagtatagtatttcttaatatatttctaccatcttattttgctttttctttttgattttcctttattccttcttctccccccccttttggttgatcaaatatttttaaaatatcgatttcccctacaattgctttgaaatgtatgtatgtcatatctagtattttagggattatccttattttttttcaaaaatacttattaaattccaacatagcttaagatcttgatctttctcctgaacataatcctaatcacagtatttgaaacttacttctaatcacaccctatcatgctatagtctactttttgtcctgagttttagttctcttttttaactttaatattagtcattatcacttttataattttagtttatgtagtcaatatagttttagattttaccacatttgcatatttcttctgttattatgtcatcttgtatttctctcttttctggacatagttccattctttgacacacatcctttagtttagatggcttttaatgggaatgtgttggtactaaggtgcttctatttttacatttttaatttaaaattttttcattttttgtttttctgaaaatatcttaattttaccatcttccctgtttatttagcttggtatacaagtctatgttgaaagtttagtttctctcagtactttgagtatattatcctactaaattctaccttttgttttcacttttcttaagaagcttcctgactgttttaaaattgttccttagggatactctctcttttctcccttgctacttttatgttccgtggtaatgtgctgttatagcatgctgtgtttagtgctagattacctttataaaaatgtttaattgggatgtattgtcctttctgaatctgaatttttaaatgttctggaaaattcttagatgttacgtattttaattgattctccatcattctcccttttctctcctctgaaattctattaatattgttccaaaagtaattacagtttttgtcattacttttaatggcaaaaaccactattacttttgcaccaacctaatacgttagaactcatttttatactgtatattgtagaatttatatttaatgtttctaagtttttttaaatttctgaatgacattgtcgatattcaatctacctttcagtttacaaactcactctgtagctttgtctcatctgcttaatgcaactaatgagaggtttttttctttaaaaaaatttaacttatattggtatataataggtctatatatttatgggctacataagaatgtctaataattatatcagggtaaatggggtatccatcacctaaagaattcatcgtatacacaacagagtactattcagccatataaaagaatgagatcttgtcatttgcaactacatagatagaactgaaggacattatgttaagtgaagtaaaccaggcacagaaagacaaactatgtgcgttctcactcatttgtgggagctaaaaattaaaataactgaactcctggagatagttgaatgatggttatcaaaggctgggaaggatagtgggtaaggtgggaaatggtgacagttaacggttacaaaaatacagttggatagaatgtgtaagatttaatgtttgatagtacaacaaggtaactaaagccaacaatattttattttacatttaaaaataactgaaagagtccagttagaatgttcataactaatgcgtttttaattccaataatatatttttaattcctggagtatccatttatttccttatcaacaatgactggtaatttttaagtattatttgatatggtttggctgtgttcccacccaaatctcatcttgaattgtagttcccataatccctacatgtcgtgggagggacccagtgagagataattgaatcatggcagcagttccccccatgctattctcacaatagtgagtgagttctcacgacatctgatggttataagggactttccctcacctttgctctgtacttcttgctgcctccatgtgaagaagggtgtgtttgcttccccttccgccatgattataagtttcctgaggcctccccagcactgcagaacagtgagtcaaacctctttcctttataaattaccagtcttgcctatgtctgtattagcagtatgagaacagcctattacagtatatcttattcttttcttgtatatttaattctcattttacttcaaataatttatgaatgttttatttctcaatccccaaatttagctgaaattgaattcatgggggccaaatattccatgcggtgtttctgctgaattctgttcattatacttgttttcttgagttttatatttttggattgtgagtttaaatttttcagggctttgtcattagtaatcctataattccagagtgaatccagagaggggttacactttatttcaaaagataccagcttggaaccattttttctattttaagttcttgatttgggggttatatccaatagtcagtgtaaattcaaaagctgtaatttaattcagcaagtttatggcttatgcattctcaagaatcatcattttttttggaaaaagataaaatacagacaaatttccttgtcatccctctttgctgactagttaatttttctccagtgtctgctttactgtgaatttagcatttttaggttttatgtggtggggctaggggcgtgagggagttcctattctttgcacaggtctattacttgatttctaattctgtttggccttgaaatccaaaattctgcattgtaaagattagtaaataccctctgactactatagcccaccatcagctaacaccctgaatttcagtgttctctttttttcttgatacccaaaagcttctcctattttactggatgctcagatatataacttaaaagatgtatgttacattttatttagcatttctaggtgtttgaaactggaaaattttcaggctcccatgttgcctcgtcctaggaaatgtaatccttagagattattgtttctgtttcctattatgtgatgtgacattacagaatgttaagtattttaaataaattatcttatatcagaaaatttatgttataaacttttggggtgcagttaatattttagaaatgttttcagatacaaaaagccatgttttaaaatatctcagaatagacattataatcttgaaaaaaaaaccctgatttttattgaagggttttgttatgaatgaaatttggaggtgctcttgtagcattctgcatttacattctagcatcacgcttcatcaataaacatgaagacatttgtataacatgtaaaaccatcttatttataccaagtgcagaaaattgaaaagcttctaaagattatatcaagaggaataataataatacaaacaataacaaacaccataacaacaaagaaaagaagaagcaggaggaagaatggcagtcacaggctcctattttaggccaagcacactcctaagcatcaaagccaaaaaaaaggcagaaaaatgttaaggtgacaaaggcaagagcccacgctacacaaagcatttcttggctcgccaatttcaaagcaactcctgagatagagcctcacaatctggctttgctattgatttgaagttaatatcaaattaacagaataccaaaatatatagtcatatatagaagcattccaaagctaaataaaactgtgtttgatttcctactagttgggattgtccctatcatcttaatgcagataattgtgagtctagtttatatccatattttacttttccatctgcaatgatactaatttttttaatagcagagccatcccccatatgaaagtatttggaaaatatatagactttcaaaatgacaatatagacgagactaagaaattattttctgggtttttttttgttttttaaatagagtgaaaaacgaatctctcaaatacaaaatatttttaaacgtgagaaacttgcacgctactccctcaaagctgtctaattcaagcaaacactaaatgacactggcagagctgattgagcagctgctgggtgtcagtcactgtactaggggcttttaatacagtgttttatttaacagtttacaaaaaccataggaattgggtattattaattcctgccttacaaatgaaaacactggcgttaagacaggatgagtgagttagtcagggtcacacaaatacatcttaaaccagttctggctattctgcagcccaagcttccaaccaccggcattgtatttttcagaatattgtataatttcatagtaattaagcaaatgtttacacttataagaaaaaatcagtaagacaatattattttatgttatgactgtatctgccgatgttttagatatactagcagtttgtggatataaggaattaaagttatctgatgtaaaaattatttattttatatttgcattttctctatttatcaatacacaactaggtcatgaaaaagactatgtaaaaaatatatgaaagtgtcaaattattcagtttgttcatccttttattgtggcccctaggcaacgatggctttttaaatcattttgtataatttgatttgcaaattgctaagtatcctagtttgtcaacatactagtctgcttctctaatttcttttcaattttacgttcttgtaaatctctttacgcttattaaaagatactcaaaaatatcactatcttttaatgttaaaccaactttagtataaacatattttatatataatgagtattatatgaaaataagatgggaaacccacaaatactattaaaaaacagttgctacaactaacacaatatagttattataaatatccatgtataaaaataacattctaaaccttaaatattatgaaatattctagctaaagtataatttaaaataatatggctactctaaatggtccaataaattataccaaattaattttcattaaatcaattaatctaataaacatcacttttaaaaataagtattttcttgtttatatatggcataataatttgtaaatcactacaaacatattttgcatttggaaaaccagatcattagagggaaaaaaaagatcctgggcattttcaaaattcctgagtttgttttattaaataaataaaaggctcttgaacaggagcataacaggatcagattaatatttttgatagagacacctcaaacttcaagccagaaacaaattggaagtggacagtagaaaatctgtggtagtctgggctcaggtgggaacgaagagaaagagggctattcaacaggtagaattaatatgatatgattgtgcattttgcagagtgaggatggaagtgccaggatcaactcttgattgattaatatgcacaaacttattgataaactgaagctaagactttttgagtgaccagtgatatagagacaatgacagaataccagcaatatcttgagttttgaacatgagtgcaatattaaaatggaggagtcaaactaaactttggatatattagtgttgagttcagaggagagagctgagacagagatatgattagagacatcctcccatagttggtagttgaagcaatggctttggataaggtctttattaaggagaatctgccaagaaaacagaagtagcctaggacaagctttaggaactctctcacttacagacgaggtaagagacaagaagtcagtacaggaggttgaaatgtgattgtcagaaaagtagaaggaaaacctcgaatgatgtagtacattgtcagccaaagaaagataaattatcaagaagagagtggcaccttctcaaactttttaatactgccagtttatctactcatatgaatgggcagtaacattgtttttaatcctattatattactctttctgtagtttatcttcctaatgagattatagcattcctgaggacaaaagcaatatagtttaggtgcttaataaatataaacaggattgaaattgccaacactatttttatcctagaaaaaaagtgatacttaatattacatcttcacttcctttaggtcttggtgtcagttctcttatcagaaaggtctctgaccggcagtttaatatctttcctctctcctggctctgtatccgccttactcaatacatttttcttcataaaaattaatgcattcattcaagtgatcattcacctaacaaatacagagcggtctataagtctggaaaccaatatatattatgttttaaagaagatatttttatcactattttcagacttaataaataccttgtatcttgatcttctctctgatatcatatggattgttttagataagtaaggtggtgatttttaaggtttgtgaattttgtgtcaacaaatatttttaaaaagatacatagtgctgcaataaacgtacatgtgcatatgtctttatagtaggaacagaaacccaaacaccacacgttctcactcataagtgggagttgaacaatgagaacacatggacacagggaggggaacaccacgcaccggggcctgtcggggtggggagcaaggggaggggagagcattaagacaaatacctaatacatgtggggcttaaaacctagatgatggattgattggtgcagcaaaccaccatggcacatgtgtacctatatagcaaacctgcatgttctgcacatgtatcccagaacttaaagtaaaaaaataaaaatcgtttatgaatcattgattcataaaatgaatatactagaaaaagaaaataccatattcagaagtgcatacacacaaacacagcccccccaacacacacatatgtaactaaataaaccaatgcagataattataaattgtgacaaattctgtaagaagaaattagtagttgaagatctaaaatgaaaaaaatttatagaaaaattttaaattgactggtctgggagggcctcttggaaggtgacatttgaactgacctgaatcatatggataactcagccatgaaaagtacaagtgagaaaaataggaagaaagggtttggttttcctgagatgcatagagaagagtatggctgaaacatggtgaccaaggatagacatcttaagtattcactctgaaaactagcaaagtagccacacaataacatggcagaactattgctaaatatgatagatttccttgaagagtaaagtatatattacagaaaaagtgaaactcatgtataattttcttacacatatttaatggtttaattcatattgttttaatttgtaaatttcagaagagggatgctctaagtgggtgaatgtatcctacgatttttagggttagggatctctctatgcctaaatctgcctaaaagagatgtgaatttaccttgcagtgagagtcaggagtcagaatattcagagtctttgaaagccacagaagtcaccctggtttgatcatatagaatacatatatgaggatcaagtgtaaaatgctactgacaggtctagtaagagaaagactgaaaatgttctttagtggcctgaaaattatcagacactatgaagagcaatctcatcaataatccatagaggttgaatgcataacaaggtggaataaatgtaatccaaattagagctcttggatgacagaatttttagcgttaagtgccatttcagttggaacataacattttatacaaatagtttttattttgaaacaatttaaaacttaccaaaaaaattgcaagaaggataaaaaggccactactgtacccttcacccagagacctccttcaacgtttgttacttgtttgaaaatgtccttgtattagtctcttttcacactgctgataaagacatattcatgactgagcaatttacaaaagaaagaggtttaatggacttacagttccacatggctggggaagtctcacaatcatggtggaaggaaaggaggagcaagtcacatcttacatggatggtggcaggaaaagagagagaacttgtgcagggaaactcccatttttaaaaccatcagatctcatgagacttattcactatcatgagaacagcacaggaaagacccatgcccaagattcaattacctcccaccagattccttccctgactcgtgggaagtgtgggagttacaattcaaagtgagagttgggtggggacacagccaaaccatatcattccttgtctggccccttccaaatctcatgacatcacatttcaaaaccaatcatgccttcccaacagtcccccaaagtcttaactcatttcagcattaactcaaaagtccatagtccaacgtctcatctgagacaaggcaagtcctttctgctcatgagcctgtaaaatcaaaagcaagttagttacttcctagacacaatgggcgtacaggcattgggttactagagctgttccaaataagagaaattgtcaaaataaaggggctaaagtccccatgcaagtccaaaatccagcaaggcagtcaaatcttaaagctccaaaatgtgtcctttgacttcatgtctcatatccaggtcatgcagatgcaagaggtgggcccccatggccttgggcagctctgcccctgtggctttgcaaggtatagcccccttcctggctgctttcaagagctggtgttgagtctgtggcctttccaggcacacagtgcaagctgtaggtggatctaccattctggagtctggaggatggtggccctcctctcacagctccactaggcagtgccccagtagagactctgtgtggggcctctgaccccacatttcccttctgcactgccctagcagaggctcttcatgagggtcccatctctgcagcaaacatctgcctgggcatccatgcatttccatacatcctctgaaatccaggtggaggttcccaaacctcaattattgacttatgtgcacccacaggctcaataccacatggaagctgccaagacttggggcttctgttctctaaagcagcagtccaagctgtatcttgcccccttttagtcacagctgaagggactgggacacagggcaccaagtctctagactgcacatagcagagggaccctgagcccgacccatgaaatgattttttcctccctaaacctccaggcctgtgatgggaggggctgccgcaaagttctgacatgccctggagacattttccccattgtcttgatgattaacatttggatccttgttacttatgcaaatttctgtagcaggcttgagtatctcctaagaaaatgggattttcttttctatcacattgtcaggttgtaaattttccaaacttttatgctccgtttccctttaaaagctgaatgcctttaacagcacgcattcacccctcaaatgcttttctgcttagaaattgcttctgccagataccctaaatcacctatctgaagttcgaagtttcacaaatctctagggcaggggcaaaatgccacccgtctctgctaaaacataacaagagtcacctttgctccagttcccagcaagttcctcatctccatctgagaccacctcagcctggatttcattgtccatatcattatcaacattttggtcaaagccattcaacaagtctctaaggagttccgaactttcccacattttcctatcttcttctgagccctccaaactgttccaacctctgccgtcaccagttccaatgttgcttccacattttcaggattcttttcagcagcacctcactctactggtaccagtttactgtattagtctattttcatgctgctgataaaaacatactcgagactgggcaatttaccaaagaaagaggtttaatggacttacagttccatgtggctaggtaagtctcacaatcatggtggaaggcaaggaggagcaagtcacatcttatgtggatggtggcaggcaaagagagagaacttgtgcagggaaactcccatttttaaaaccatcagatctcgtgagacgtattcaccatcacgggaatagcacaggaaagacccacccccatgactcaattacctcccactcggtttgtcccatgacacatggaaattgtgggagttacaattcaagatgagagttggatgggcacacagccaaaccatatcagtcctttacagcaaaaggacccactctgggatcacatgtcacaccctgtttttctgattctccagtctctaacaatcataattatatcttcactttagtaatttcttcactttcacaaccttctcattcttgaatattctatcccagtcatttgtcgcttgtcctgaaattggattagtttgatgttatacccagccttgtatttttgacaggtgtcttacacaccatgctttattcttctcattgaatctcatcaggtggccccccagtatcaattggtcctgttactcatggtgataacattgatcacttgattataaaggtatctgcctggtttctccaatgtaaagtgactgctctcccctttgaaattaataaacatatatatttttaaaattggggtacttggtgtatatatttatgaggtacataagaggttttgatacaagcattcaataatggggattggggtatccatctcaaacatttatcctgtgagttacaaacaatccaattacattgtttgttattttaaaatatacgattattattgactgtatttaccctattgtgctatcatatagtaggtctcgttcattagatgggggtggtttatgagttttttaaaaaactatatttttaaggagatagtttgaggctatgttctgcttccaactttcacccacttatttgagcacctattgatatgccttgcctgaattaattattaacatgatggtttccaaatggtgactttcttcttcctacattcctgttacatgtattacttagtgtagtgctattggaggagctttctattttccctgtgtatttattcacttttagacaggcagactcttggattcctactttattcagtaggatatgatctgtagcttcctctttttttctcctcccttttttattttgatattcaaaatctctttttgatactcaaattatttattttgtatgcaaattgcccttaatttgaggagcagatgccatttcaggctggctcctgtgtcattctgacatgaccccatcattctttgggcacttcattactttttggtgtggcaaaatgttccagattcttactgtactttccctaacacagcttagaatcagtcatttctccaaggagtcttggttttgcccagcatagaaaccaggatctgggaaacagaactattcattgctttgagagtgaccctgtacgtaggctgtcttcagtggatgataggaaccatctgtatattgaccaaatatacaatttcattcatacttatttctgtatctatctacatatagtgaaaaccacaaatttacactaattgattaaatcctaatgcaaacccactgggttcattctgtctttttttttcttttcttttttgagatggagtctcgccctgtaacccaggctggagtgcaatggcgcaatcttggctcactgcaacctccacctcccaagttcaagcgtttctcctgcctcagtctcccaagtagctgggattacaggtgcacaccaccacacttggctaagtttttgtatctttagtagagatggagtttcaccatgttggcgaagctggtctcaaactcctaacttcgtgatctgcccacctcagcatcccaaagtgctgagattacaggcgtgaacattctttcttatgtttcatatgtgtaccctctttctttgacgttgggaatttgactctcactatcctccatgtatttacttatttgcccaatcaacctgtactgtaaccaatctcccagccacatggggtggagatcctgtgtggacatcctctgtgcacaggtcctggacaccactagactctcttcccctggactactctatcttcctgcctgctgggaccctagtttttatgaggctgttttcctgcccctgctcaatgggtttttgactaagttattcaggaaggttgagtaaacagtagagattagtagacattttgttattcaggaaggttgagtaaacagtagagactagtagatattttgtgcaatctgccaagatcaaattgaaaggaagacagtaggtggttttaaacatccttaaagcattccaccagcctcccttggacctcccaaccttcccaactttaaaaaaggcagagagaagctttatatgcacttggttttaaacatgtcaatttttcaaccttgttgtccaccgtttgctttttctgtcccatcagatgaacattataacttacaacaatttaggttgccattttaatgtcaaaacaaatatcagcaagtttttcactgatgtatttctgaattaaaattttaaaaccttgaaaatgcttgtgttttctttgtcagcaagaatagcaatatactgagtggacttcaaatcaagtatgaagtttttatatgcaagtcttgaaacagaaatttcagacatgccagtgaagtaatataattacaatgttcctggaaagaagaaaggtttccagtgcatggaaagtaagatgcaattgagactgacaagattacaattcactgtgggtgttttaacacattgtcagattgtagaaaccagttacaatgacccatgtatagacattgtattttttattccaaattcatagaaattcaaagatataacaaaaatacgcaaaaattttaactttatatttttactaacttgacaattcgttacattcactttatttccattttatagctattcatttctgaccctcaaaatgccagctgcaaatttatattaccaaaaaatcccactgttaatctaagtaggttaaatcctgagctttggagtagtcactgaaggtatcacaaacactaatacactagtatttttactgaaatttcatttgttcataaagagaacaaacacagaaaataaataataggttctcctctgtttctaagggagttaaaacagcaggaggttcagtatcagagatccaacatctttagctcattgttgactaagggaactgtcaatattccaccagttacataatgtttcacaggtgtgagtaatcttcaggttctaattattaaaactgatttgagattataatagcaggatgtgtttgttatactttgtattagttatatattgctgcatagtgcattgcctcaaaactcagtggctcaatgtagtaataatttattatctcttacttttctgtaagaggccagtaatttaggagcagcttggctgggcagttctgacttgatatttcttataaggctgcagatacatgtttcctagagccacaatcagctgatgacttgactaggattagaggctccatttcaagatagcagactcacatggctagcaagctgctgctggaacttggtaataggctttagttctcctcctaggtgcctctccatcttactacttgagggtttccatggcttttaggctggcttccctggagtaagggatcaaaagaccaaggtgcagcctctaatgcctttatacttaaccttggaaatcatatcaccttgttactactgcaacattctgtgtcacacggagcagcactgattgtgtgggagggaactatacaggccgtaaatattaggaggtatttaaaataacataattataatgtgaagatttatggccatcttggagattgattgccggtgttcaccctacagcccacagagatacatatctttttccacacacgaagtacacccaacctcctctaaaagccatccaaagtctcattccactaggccatctgctcaaattccaggacctcattgtctaagtcaagtcaatccaaaatgaatctcagagagtccaagagaaaatgaagctgtttaggtatagtcactcaagtaccacttcccaagtacagttgtcaatcttaagacctgtaaacaagttttgtgccatcctcacaccacatatacaatggtagattatgcacagagaaaccaaattagactctctggttcaaaagtggagaaaataagagagacaagtcactggtccacagcagttttgcaatccagtcaggcacatgctggtcattcttgattagaactcagtcatgctgtttcccggacatgattctccatggctcttggctctgccctctgtgttagttctgccactgtaagtcatcctttttttatgtatatagaggttgtctatgtttacagctgcatagactcctgaccataaagtttggaagtcaaaggcctgtttctattttgtcccaactctgtccctttcagtacaagctggtggtgttacctccaatatagttatcttaaaaatgaatgggttttctatgaattttattcaggtttactccacttaataaaaggcacatccacaattatataaagataagctcccccttaccccttgagcttctgtagatctacagaaggaaaatgcttttaagataattagaatccctattgtttaactgaaaagacctgtaaagcataaaaataagctctttagagggtcttctgtctcatggagtgtctccctgaggaatacctaataattttcttgggtctttatgtagattttatagtcacgcttccttgtcatccttagatcatgttttcctggaatttgatctttgcttagaaatgtgatttcttaatgtttgcattgttcaccatctggagagattggaattgaaagagcattttactttaaaattcagtaatgcctggcttcttcatttgtaatagttcttctttagctttttctctcccattttctttttcttttactataaacagaagatgcccgatggctccttcaatactctacctggaaatgtccttagctagattatacaatttcatttaactgtatctttttcttttccatattatcacaagaaacaatgttgctaaactttccaccagaacatagcaaagatctaattttctctaatttctgatgacacttttctcaccttcctttaagtcattacagctcctcaagagccatcacgcttcttttaaggcctgtcccgctaacttgcatattcctgtccctaaattactgccacattttcaggtttctgttataattctctgccagtatcaaattctttttttttttggtactaaagtattttattctattttattttatttttaatttttatttccataggtttttgggggaacaggtggtatttggctacatgagtaagttctttcgtggtgatttatgagattttggtgcacccatcaccttagcggtatacactgaacccaatttgtcttttatccttcacccctctcccacctttcttccctgagtccgcaaagtccattgtatcatttttatgcctttgcattctcatagcttaactcccacttatgagtgagaacatacgatgtttggttttctattcctgagttacttcacttaggataatagtctctagtcccatctggattgctgtgaatgccattaattcatttaattttatgactgagtagtattccattgtgtatatgtataaaaaagccacatattcatggcagcacaattcacaattgcaaaaatgtggaaccagctcaaatgctcatcaatcaacgagtggataaactatggtatatatacaatggaatactactcagccataaaaagtagtgaattaatggcatttacagcaacctggatggcatgtccagacatcacattctttatttgatatctattgttgcattatgtgtcaccttaaaattaatttcaaacaatgatgaatattcattacctctcctgggccactccagaagacagtgtatgacatggtgatgacttgccacgaagtaagtgatctcagagaccaagttgcagagttttctattgttcacagaagtcaggcctaattgattatagaaggggacaacaaaagggtgtgaagtcaggagccaaagattaacgatgtccatcttggaatattatggagagaaaaaaattaatgaatatgtagtattttgtcctataattatcttctcctagaatatatctcctattggaaaataaaaggacttaaccacttcaaacttcaaaattaccaagatcaaacagaacattgttataagcgaatgatgaattcttgttttacaaccttaattatacccaatttgtagtaatcggtatttatgcagctgctgtgcttcagagcagcttttattttcacacatacatccattcattttgaaatctttcaaagctagtgtggatatggtgagactcccaattattcaaaaaaaaaaaaaaaacagaaacaaatgacagtcttcttaagagtggtcagtaagttacaactgggtgttttctctctgctaagtttagacattacactctattcaattttatcttgattaaacaattgaaaatcatgtgtgcacgcaactggtataaacagatcatttacctaatatcagcatttttctgaagggactaagtcaatgcgaatgaaaaaaatgtggttgactagaaaatacacatacacacacacacgagccatatattaacattaaagtagagccttacatggattttttttaagtcaagaagttaattcaaatacaatcttatttttatacagtactgtgttaataggaaataatatatacctttgtgattaatccttataggagattcaaatgacagttattggactttaaatattgtaatccattaatgaagagaaaaagaagatttctgctctactaaaatactatccttggtcaaaaagaataggatattttgaaaatgtcacttaataactggtatggtttggctgtgtctccacccaaatctcatcttgaattgtagttcccataatccctgtatgtcatgggagagacccactgggaggtaattctatcatttcataatagtgagtgagttctcatgagatctgatggttttataagagtctttttccccactttgcctgacacttctccttgctgctgccctgtgaagaaggatgtgcttgctttcctttctaccctgattataagtttcctgagccctccccagatattctcaactgtgagtcaattaaacctcttttctttataaattacccagtcttggcatgtcttttttaacaacatgagaacagactaatataatggccattttttgtttttattgaaaattcacttttatccatttaatggaactttggttccatcccattttatataaattgtttgttgttacagatataatattagatgaagtgaatgtgtcaataacttcagatttgcaagcagacaaattagtacagtttaaatttgcccagtaggcagatttggtatggtgaaccatatgaaaagtagaagctctggggactttctggagatacttaatgggattgaaaaatatcattttcttatggcctacaaattttccatccataatgggtgtttctatccaattatgcatgtttctcttaaaaagatataatagtaattgattggtggtgatctcttaaagttatttagcaataaactcttaatgtctgatttcaaggttggtgtgggcattctatttcctaatagaatcaacagtattgtgtgtgtgtgtgtgtgtgtgtgtgtgtgtgtgtgtgtgtttactcttgttatttactcttttaattttagttctatctgttattatttactagtatatataccatattatggtattttatatataccatattatggtattttatttataccatattagatagtttgtagaagatgtatattcaaagtagggtggctgacccttatgcctaaatttatttgcttctaatgttcccttagattttataaattaaaaaaaggcatctataatgcaaatatctctttgtaatgagttacacactaatctactttatttcataatagtaagtttggcttatttgacatctgaataacaggcaatagggaattaagaaaatagaaataaatatcaaagaaacaagaagaagaaagttggatagttgggaaagttctaaagttttgtgtcctaatctctgagggctggctcagcagagaaagaataacagtgagtctttgacagcagagggacagaaagatgtgacagtgagaaagatgatgtcaaaagagaaaatttgagtgacagtagaccccagaggcaaacatttacctggtaacccattacaattcaaccctgacttcttcctctgtaataatctcactttctcaaaaaacttcctttttctacactgaatataacatcagcaaggattaaagaaacagtagttggatgtgatggctgtggccaggtagaatacccacaagaattttagtgaaggttatactgtacaccagatttacattcccatttcttctgtttcacaggttttctgaaccagatgaataactcaagtcactctgtccttcagccttcattccaaggatgcatgcagctcattcaagtggacgatcaacttgtaaatttatacgaagtggcacaaaggaagccgggaagtttcgcgaatgtcagcattgacatgtgtgcgatcatagacaggtaaatgatcttttcatcctacctcacgttgtccaaactttccaaacctgtgtttctgttgtgagaccagtgaaacatcccaaaagaaaattaaagttaaaaacaggtaaggtggaaattaccattcaaagtacgtattgtagtatacttgtgatattagcagtgattatgtttatgtttttatgtggatatatatatcatatatctatcatgtatatcatatatagcatatatatgctatatatgagatatatcctatatgtgctatatgagatatatcatatataacatatatacatatatatgtagcatatatatgtatatatagcatatatgagatatattgtatatatagcatatatatgataaatatatatgagatatatcatatatatatatagcatatatatatatatatgtgataaaacacactgtggtgttatatttgttcaacagtctccaatcagagaatctgagccttcaataagtagttttgcaagcaacagcagtgtggcagagaaactctgacagttgatttttagtttacagcagaaatgtgccttctctttctgtctcaatcatgacttggcctcagcatgtgccttccaaaacccgcttctgaaagaaaaggaatattacaaaagtgtcagtgtgcaagatgggtatttatgaagcagaatatttagagtaactggttcagcttacaaaatacacctattaaaatatgacaaaaatcaaatctttattggttttgcaaacctggggagaaatttttaataaaaactttaattgtattctcacacagtgggaagatgcaacttttctgtgaaatattatgattatactgcatacactaccttaatatacttctagatagggcctgtcattccactatgaacaagtttcattttgagatgctttgtctgtaaacaaattatatatgatttgaagttaacctagtgaatttatatgattttctaagatatattgaagtcttttgaggaagaactgtcttatcctaaaagctcattttattaattttgtgtttagggaagatgaaagttctttaaatttttttaaaattttgaactaagatattaatcctatctcagtctacccacaacaaaatgtagaccataagtctttaacaaatgtattttattcaagaggaaatactttaagaagtcactcaaaaatgaattttacaaacatataaaataatctattttgaagtaagtttgctttcataaaatctgaataagatggcgttcgtgtgaatggtaagttacagtttgtggtggctgtaagatagaacttctataaagccttcacatgtttataagaagactttatgacatagtatactgcttatttctattcatgtatgcaagtactgatcttagtagcctaaacagtttatatttaaatagaatagtgaacaattttaatggaaatatactcctaattattgagccattaataatgtatcagctattatttctgcctagagcaagtagcagcaataatcagaaaagctgagatgaatgttttaaagatcatttgttctgattttagataattatctacatattgttttgtacagaaaaaaatattttcttcataatagttatggagttttttagtatctactctttttttcaggtcagtaattgtgatgatacaataatttcattacctctttcagcttggtaaaagggctaggtaatatgttgctgtttctctctaaacatcgtgtttctaggcattatatataaattgtttgctactaaagaaagaggggtgatatgttgagatattaatgttttactctgatagagacaggagttaaattggtcccaaaagaatgaatgggattttggtaaattaataaaatggaaggtgatactcctggtggggagaccaacacaagggaaggtatagaaaagaaaatacaagtttcaatttttcacagatacagagatacacaaaatttttttttttttttgccaaaataggtcaggcccaatattcatcttgccaagtttcctgcagctaaaagaacaaagttcacacctttcttattctttaggatgacaaatgaaaagattagctgcagggaagtagccacctgtgacacatctccacgcattttctaaacccattatgggacctatttttagcttacactttttttttaaggcaacaacatctgtacattaaataccaatgtgtgaaacagcagattcctttagtcacctaaaatgttcccagttcaaaatcttaagcatgaagtgttgtactttcataggtatgagacaggactattttacttaaaccactgaagagtgtattgatgatatcacccttaatctgtgtctttccaggtaaaagtaccagtggttttagtctgtcctcatagagcagtgatgtatccagataatcctttaatgatacacccctagcacatctctgcttctttctcctcgctgagactttgcaactgccccgtatctacaactttcttttcagattacccaaattctcccaaaggaagcctacagtggcttttcttttctccttcccagttccagcttgatcgatttgagagttatttttgagagggagaaaaaaaaaagtataaatgagaacatagggtaaaaaaaataaaagagctacacaagcctgacttttatagaatgtttggagataatagtcacagctgcaatgatttgatgagtagaacttagggaaacaatttgtctgaaggtgtttttctgtgtgttgtattggaataccctacgatttgaactttttttttttttttttttgctttgtgtgtagatttgcatgtggcttattttgttcacgtgcttattttctgaacgcagctttgaatcaaggaaaaagcaagcttgccaagctacagaattatgcattcagtatttattttctgagtgcatactagatgtcatgctattctaggcacttggaataaatccttgaacaggacagataaagattattgaaaattctaagctgacatggtagagggaggggaggaaggagagatgacaaactctaattaaaaagtaaataatctagcaagtgagaaggaataaattttatgggtaaaaatactagaacaaaacaaggaagcctggcatgtcagtagatcaaggtgttgagttgtagtttaaataggttgaccaggataagcctccgttgaaaagataatattactgcaagacttgaaagaggtaactgaatgtactaatgcagggaaagaacatttgacccagagagcacaggcaacgaaagaggcacttgcatgatccaggatcagtatggaagccatggtggcaagtttcgggaggtcaagaatagttgaaggaatagacgccagaacaagccctccagacttgtaggttattgtcagggtgtggcttttactttgaatgaatacaggagccatttgcagcgttctaaatagagcaacatgatgtactcacgtcttaaaaggatgaatctgggctgtgggagcaagaaaggtagaagcaggaggctaactaaaattatgccattataatccaggtgagagacgcgtgtaccctagaccagggtgctagcacaagaagtagtgagatgtggccaattctgaatatattttggaggcagagtcagtagggtttctttacaaattagatgtggggtatgagagaaatggaggaaatagggataaatccaaatgatttgctaagaacagcaggaagaaaggagatgccatctcttcagactgggaagactagttgtagagaaaattagtcaaaggggctaaagaaaaagtcagaaattcaaggttggacatgaattgaaatgtctactggacgtctaagtagaaatgtcaggaagagagttggatatatgtatgtaacaagcctgtgtctgcaggtttacacaataaacctttgtgattgacagaatcccttttgtttaactcttgagggtctttggtgtctttagttacattttataagcaatcatagaactggaaggggaggtggtggataatgggcagaaattgctctctaacaatggaagctgctagcttgattcccttagtgataatctgctcttagagaggaggattgtcatcaaccttcagtttccaaaacattctctgagaaaggtaaaatacccagagataacatttttgtttcttcttgcattgttactctcttttactcatttctagaacccttgcattattgactgcttgtggcaaacatcttaagatgcctgactcaactcttattctcaatctttttctctccagcctctttccaggtgtgaaaacctgagagcccaaaccttcagaaacactcctttagccacagttaggtccactcacttcttccttcaagagagaatcacaaggagaaccatagggcatctcaaagttggggagagggggtgcttggggagggacggacattgagggagagtcagggagggtattaggggatggagtgagtcagtccttgttggtattggctagaattcctaaactcggagactcgctacaacagatctgatagttggcctcagaacttgtgaattgttgtagaattattgtttgacctgtttttctgtggttgtagccaggacacatggttaggaagaagctgatgttaacatattttgagcttaattaagtggtgatcatgcttggtttgacaatttttttttctgttttgtgagtaatagtgaagtccattttgcaactgtggtttctgtttcagtcctaagagcactcttcacagctcagctgccagaggaatgttttttactttatgctaggcagaagcagagatgagacacagttctggctgctaagagctaagcagaagttagctgtggtgttcttgggaaagcttttgttctcctgatacagttgcccctcttgctctccaccatccttggtaaaatgtagaactgatgtctagagctgtagggtcaagaaaaccatagatcgagcagccactgatactaacttgtatgtgaaaaatatcaactatcacttatctaagtaattatgaattaagttttatttttcttggagccaaaagcacctgccctttccctagtccccacttctaaaattaaccagtaccatcattttaccagaatacagaagaacaaattcctaaatatggaaatgactttgaaagaaaagataatactttttggagtgtattaagttgcattttagtgatgtcccctagaggttgaaatctggggactaaatagctgtttagaggccaaagcaaattcatattgttagagccagcactagtaaaaagtgactcattagaattagaatctcctctgctctttcctgtctaactccattgaaaatatattaaaaaatacatttagaaacaaaatcagtaaacatcccagataacacagagagcggaaaaggaaatgcaaattgcccaacttaaacatagcctacaaaattaccacttgagaaattatgaatagactagatcctattccagagttagtaattaagtcttcattatatttttggatgaagtacataatcacagacccagtttttttttaattcaatgctttattttcaagaatatccagtttgatttttttctttcaaagaaaagaataagtaaatgaattttcataagaacatttaaatgaggattaggtagatacatgaaaaatatctcaaaactaaattgactctgttggaaaggcgaatgaaagcagtcaagaaggatgatatggtttggctctgtatccccacccaaatctcaagttgatttgtaatcaccatgtatcagggaaggggactggtgggaggtgattggatcatgggggtggatttcccccttaccgttctcatgatagtgagtgagttctcatgagatctgatagtttaaaagtatggcactttccccttcactcactctctctcctgctgccatgtaagatgtgccttgcttcccctttgccttctgccatgattataagtttcctgaagcctctccagctgtgtgggactgtgagtcaattaaaactcttttctttataaattatccagtctcaagcagttcgttatagcaacgtgaaaatggactaaaacaaaagaggtcatgagtttctacaaaagcaggcttaaattttgcgttcataacttagatgaagaaaacatgtaacatttatcattttctaaaatttgtcttcattcgctaattccctatttctagtcagtagcagaaaagataaatacttgaacacatacattttggtactgtaatcactcctcctttccgtgtatattcggtcaacatgggagttgatctcagtcaaaggtaaacttccttttgtggttgtactaccatttcaagagttctagatgccctagcatggcttgggtcagagtcagcttatgcaatacgttatcaccacaggggtgggatctgtcccacctgctccaccaaggttccctctgagctccctgagagtccccagcctggtcggccttcagggtcccacttctgtccctgccacccactgtcatgacaactgctccttctggccttcagatatgtcatgggtattgctggacttaggttctgggatctgtgtttaaggtgacagctattcccagcatgtctgagtcccatttggttttagcattgagagtcctgcttctggagaaacccctcagttctgggtaaattaggatggttggtgactatacacactaggtcttctttctcctaataccttcgtctgatctaccagccatctaagcattttataggccctatagggacacacagtgatttctatatcttttggagactacataaagctgaaataaatcatggcatatgtgttgttggggagaggttaggcattagggacagcttccttaggctacgccccctttacttcagcatgccatccctccctatctgctctacacagccactcaggctgacatgaggccctctacacattagaccctcaaaggccatcataggattcctaagtctctgctgtataaaccaaatataaaattctaagccatcatactgactgatgaaccctccccttagccaaagacattccaaataatcctgaaaaaaaaaaaaaaaaaaactagtttaggtcagacatgcctcacaaacatcaacacagagaccttaagactgatagaatagtctctttaagtctgataagaaacatctacaatccattctctctgaagactgctacctggaggcttcatctggatgatcaaagttgggtccccatgactgcttatcctaacccagacattcctttctattaattccatgtctttaaataataactctttcaaccaattgccaatcggaaaatatttaaatctacctatcacctgggagcccctgctttgagttgtcccacctttccagatggaaccaacatacatcttacatatattgactgttgtctcatgtctccctaaaatgtataaaaccaagtcacaccccaaccaccttggccacatgtcctcagatcttcctgaggatgtgtcatgggaatgtccttaacctcagcaaaataaactaaattgattgagacttctctcagattcttttttggcttagggttgagatttattcagtcaacaaatacttcttgaagatcacaccaaccagcagacagtacctcctgggactgaatgctgaggtgacgaagggagggtgattgatcagactctacactgttttaatggttgtttggcttttatgtcttaacacttacaatgcctctgttttgctctcaaaaatatagctttttccaatcaaaagctacttggttttagactacttttccaaaattaaatccacatgtttcttaattttctgtttcagtccagactctagaggtgaattatcccagaacctactttatatgataattgtataaccattgatccactggtaagacagccatagagtaagaaaaaaaaaattttattagtgtttctttagtgatggtttttatgacagatttcctttctctttcacctgaatcttgctgactccaaactgctaccctctaggtcggacacctccttttttcatacatttccaggttgaccatctccttctctttttttctttagaaatgttaatgtcatcatttaagctggcgtcaaactgtgcaggcatttctcttactttgggaaatattttgtcttttaccattaggtgcttatttcattacgcatactgtaggcttctggaaataccttactttcattcatgataattattgataagaggtaaagggggcagaaagtctcccagataaattcacgttattcaaaactctacatttgctcaatcctgacatcgttgtgactgtgatcccatcaaactacaaataatcaaagaacaggttggctgaagctaattctgaaagaacttgagccaacaagcaatttttcataagtgaaactggatttccttttagagactgtgcttcggacaaaagctcttgcgtcctaaaacctaatccccaacttaaacatatagaaaaacgtcagttttctcatggggtcatcctattgtgattctttcaggtagatacgttcatcttgtcccttcaccttaactcggtttatttcccatattggattccactgatttttatgttgcaaatcgctatgctctatcttagtttctgataaatgaaactactggcaatttctgagaagtcccatttcatcatgctaaatctgacttattcataatattagatgtgtgactctttatttaaactttattggccttccatgctaactccagtctttcatttgatctttagcttcctttggtttcttttagaagggaggagcttcctgtttatacataaacatttaagccatgggcatctttctagcacaaaaacatcagctcaatgacctaaaagtatcacatacccaggcgaacccatgttcaagtcagttgcctctctgaagtgatttcaaagtgattttattttaagtacaaatagaatactagagtgacaaaaacatattcttttttaaaaaaaggtagtgaaatgccagaggagataactctcctaagaaataaaggaaaagaaaaaagttgaattagccattttaagattcaacagcagctgtattcttctttgatgcattgcatgtattaggacaaaagaaaactatatttgcttttggcatggcatatagctgtgctttgacatttaaatcccaaggaaggcttagtgcattaaagtaatgtcagaaaaacagttatatgtttgaagataagcagaaaggaaatagataaatagttttaacatgtagctaaatcaactacggagagatttaaataagccaatcgattttatttcttgcttttgatatcatattacctgcaaaataaaaataagagcaattgattttaaaacatttaaaatatctttcttaacaagtgctttcttcttaaaataattgtttttgtcaattacttgaatacattgcagttacgatttcacactaagaattcatttaactgctctcccctaaaccaagattacagactcatggacatgtaccattctttttgtaaaatattgggactgatacaacttaatgaaggggaagttggagcttgtaggacactatccttcatttgctatatgctccctaacatgctgtgtgggagtcagttgttcattcctgaaaatgcatatgcaagtcatacttgttactgtaataacatggtttaattaagtactaagtacattttcaaatgagcagagacagaaaaaagtttctggtaaaatcaaatgtaaaagttttagaaagacaagtggctcaaaacaaacacaaaaccataagtttatgtgtgggcctagacaactgtaaacatttgcagagattcataaagcccaaggtgaactcactgaaattcattggcgattttagttttcgctgcacttgaaaccaaaactgaaaaatgaaggtgatactatatggaaatggtttgataaaaaggccggtggattgaactacagacttcaaataagtcttcaaaaaagtctttgggtgaactcacacccaaaggccccagagtaattccctctaacaacgagtcattgaggtgacataatgtaggttttcagttaaattaaaatggttaaggtgtgtatctttttaatgacatttctttactggatttcattaaacccaacatattgaagacttgtatcattccccaatctgaataaaaggagagttcattatttctttttgctttctctttttgaggagtctttgcattccaaatacagagaaaaaagaaaaggaaaggagaggagaggaggggaggaaggacaatctgttacatcacattgttatctggtttattagtataagactcttttactttcattaaatgtcaggagtaaaaatttacaatggtatttattatagcatttgaaaataacattttgtttgaatttttttctttggtatttaaatgatctataagctgaaaagaagaggagtcatagatttttctatgccaagaaaaaaacagttttaaaaagatgaagttgtcattttcattttgtttgattaaaaacacatatttccatttcctctttgtattgttgtatctatactgcccaaaaactagttttaagagggcaacaagcttagtttttcagatagcattgtctaaaattctcatggcacccattgctatattagagataagtactttgttgtctttgcctatgaattcattgaggaatattagagtctgaatcttgttttgtttaccaaatcctgcttacatcaaaaagaatgttacatgagtaagaaaggaatgcagatggaaggggtgaggagtatgtgtgtgtttatttgaaatggttttgaaaaatgagtctgtaataaattttaacaaattacggtatctgaaaagggtgtcttaatcagtaaacaggttgatttaaatagaccattatctacaattgtgatcagggtaaaaccactaagtaccatacaacatttgtgtatagcattaactttgtttgccttcaacgagtcgcagctgttatacttttactgtgatagtttcatgatttttgcttctttggcatagtcccagacaggcttcatcaacaagaaacttatcttcatgaacacacttcagtgaagacccccccctctgggaaattagacatgacataaaagtgcattgcttttttaaaacacttcaggcatttgaaaattacaagagaaattttcaagtggcacttcctaagttagaaataccatacacataaggccgggtgcagtggctcacgcctgtgatcccagcactttgggaggccgaggcgggcagatcacgaggtcaggagatcgagaccatcctggctaacatggtgaaaccccgtctctcctaaaaatacaaaaaattagccgggcgtggtggcgggcgcctgtagtcccagctactcgggaggctgaggcagaagaatggcgtgaacccgggaggtggaggttgcagtgagccgagatcatgccactgcactccagcctgggcaacagagcgagactccctctcaaaaaaaaaaaaaaaaaaaaaaaaaaaaaaaaaaaaagaaataccatacacatgaaggcaagtttctctcacatagttattataggacacttgttaatctcctatgaaggtcaaggccactggtactaaactacacaatgagaaaaccaaaagttacaggataggatctcttctcccagaacaggtactgatgtagcctagagacagtaaacattcacaagaaatgttaaaactatgttaagaagcatgtaagcatttgcttcttaattgttacagataatgatttctatagaaaattaataagaggaataaaaccactatcagctgcgtggttaatgaaaaccgcataaaagaagtaggttgaacttcagaggagcattagcctcggatgatgagaaagaaaggcaggaacatgccaggcaaaatcagaggcatgagcagaagtgtggaggcacagataaccatgtcccatttctgaaacagtcaagagatcatttaaactacagcaacatgtttgtataggagagtcatggaaaagttgaaaagatctatttttcatttattcatttatccattcattctacaatgtttcattgattgcataccatgtgtccaaggacagttttagccttgaagaataatttgtaaacttatggattctactttcttactgatttatgaaagagttagacatcagaaaaagcacacacacacacataccccatggaattgttggaaaaaaacacacaaacgccaaaatcaaagtatgcacaagggatcttgtgcctaattctccctgggatctaggttgggatggagatggcagaggagcagttcaaggcacatgctataggcattccagggagctggaaagtacatgggtgtgaatgacttgagtacgtgcagtaaactcaaggatttacagtaggttctttcacagactggcagctactagtgagggaagatttgaagctaggaatttagggggatcctaatgaaagaggaccttgcggccgggtgtggtggctcacgcctctaatcccggcactttgggaggctgacgcgggcggatcacgaggtcaggagatcgagaccatcctggctaacacggtgaaaccctgtctctaaaaaatataaaaaattagccaggcgtggtggcgggcgcctgtagtcccagctactcgggaggctgaggcaggagaatggtgtgaacccgggaggcggagcttgcagtgagcgaagattgtgccactgcactccagcctgggcgacagagcgagactccatctcaataataataaaaaaaagaggacgttgcattactagaaagactgtaatttatcctttgagcaatacgcagccattgagggattttcaggaaaatcaagttttgcatgactaacacttgttctgattacctgggcagaggtgatgagaaatgaattactgcagtagaaccaggtgaaaaaggaaatatccaaggtatttaggagttggactgaggagagagggctcattagatgtggaaaccggaaaaggtattggctagaaagagaaactggtttcagagtaagaaaaggctttaatgaaagattgttatattcactagtctccccaaacaatgtcttaactgactatttgtttagtagtgggtctaccggttagggtaagattttactgggatctggaagatggtgaaaaccagtagcagcaattgagcaatagagagtggtaaaagagaaaattaaaatagaggcagaattgagatagaagtgcaggtacacttagaacgatctgatctttgacaaagctgacaaatataagcaatggaaaaaggaatccctattcaataaatggtgctgggataactggctagccatatgcagaaaattaaaactggaccccttccttacacaatatacaaaaattaactcaagatagattaaagaattaaatgtaaaacccaaaactataaacactttgcaatacaacatatgcagtaccattcaggacataggcatgggcaaaggtttcatgacgaagacacaaaagcaattgcaacacaagcaaaatttgacaaacatgatgaaattaaactaaggatcctctgcacagcaaaagaaactatcatcagagtgaacagacaagctacagaatgggagaaaatttttgcaaactatgcatctgacaaaagtctaatatccagcatctaataggaactgaaacaaatttacaagaagaaacacaatcccactaaaaagtgggcaaaggacgtgaacagacacttttcacaagaagacatacttgagatgaaccatcatgaaaaaaaaaaaaacctcaacatcactgatcattagagaaatgcaaatcaaaaccacaataagataccatctcaggctagtcaaaatggctattattaaaacgtcagaaaataacaaatactggcaatgctttgggaaaaaaaggaatgcttatacactaccggtggaaatgtaaattagttcaaccattgtggaatacaatgtggtaattcctcaaagatctaaagacagaaataccgtttgattcagccatcccattactgggtatgtaaccaaagaatataaatcattctattagaaagacaatccatgcagacattcattgcagccctattcacaatagcaaagacatggaatcaacctaaatgcccatcagtgataaaatgtggtacatatacaccatggaatactatgcagccataacaaataataagattatatctcttgtgggaacatgaatggagctggaggccattatccttagcaaactaacacaggaacagaaaaccaaatgtcacatgttctcacttataagtgggagctaactaatgagaacacatggacacatagaggggaaaaccacacactggggcctgtcagagagtgaaggatgggaggagggagaggatcaggaaaaataactaatgggtactaggctcattacctaggtgatgaaataatctgtacaacaaacacccatgacactagtttacctgtgtaacaaacctgcacatgagcacctgaacttaaagttaaaacaaaacaaaaacaaccacaaagaaatgcaggtagtgagatactggattaaaaaggaaagcagaagatgtgcagagctatactctctaatactgcagccactagccatatgtggctatttcacacttaaaaagcagctgttctaactgagacgtgatgttagtgtaaaatgcacaacagattgtgaatacttcatacacacacaggaatataagacagctcattgatcatttttgtattcattttattttgtgttaaataaaatattaatattattgtcacctccataagattttaagctacatatggcatgtggctcacaagttattaatattagtgctgttctggaatctttctctaggtagttccagctggatgctgtattgcaagaatgagtgccctagcttctttgttggtcttgtccacagatgagtaaagagatcctcgcaacttctgataggactcaacaagttgtcctttataactgttttatctcagagacaatgcagatccccagaatgtctgtgaaactggcatcattctgaaatcacagtcccttttcattagttagaagttttcttaagcctaagtgtatttgcaataccatctccagagaatatctttacagacttagaagccagatgtgttggttttctcccagaatattaattccctgttcattaaaaataaaataagaagtattcaatgggaaaaaaaatgtggcctaaattaagatggtattttaattgagcacaagttagaactttcctggctcaaagattaattttttctagtaaagtatctgtcagttacacaactgtgtataattcatcatccttgaagtgaaagtttgggtctcagtaagaaagtgctttcagctgttaggaacagagacccaatcagttttccaggcaaatctgaagtttatttctgcacatgtaagatgtctgaaatagacaattcaggctttgtataatatatctagaaagcgatccgagacccagactcaaacattctgctccagtttccttagctcatggtttctattttcccagtgattaagattgctgctagaactccagaaatttcatctgattttcataaagaaagtaggagggtccaccttccgttttaaaaagccattccagaagttccgtgcaacattttcaatcatatctcattagccagatttaatcacaaccacagagttgcaagatagactgagaattacagtttcattctaggtggtaatatgcctgctaaaactttgaggattatcactaggaaggaagaggaaaatctgtaatgagatagatagcactctctgcccagttgatgtttcgaaagattataaaatataaatagtaaaaaagtgcatgcttccagaaaaaaatatttgatgcagcatttatcttattcaaaccatatattttatatttttcctccaaaaatttaaaatatagttatcaaacttcaggcttagacaatcgacattttagggtattcaagagtgaagatgatccagcctcccttcaaggatttcataagagagtggcagaggtatctagttcttattctgacctcctactcgaaattcatcagtaacttcttattgcccttaagaaaaagacccagatccttaaaagcagtgtattagcctcttgtggtctggcctttgtcttcctttgcagcttcatctcacatcactctcctccatcccctctagccacgctggcctgtgctcagtgcctcagatgttctttcagtggggcccctgcctgtactgatctctgggtctagaattgcttcaccccaccacccatctctgtctctgtctcttgctttcttatccttcatatctcaattcatagataaactccattaggggagccatctcaggatctgtaagactgggttaggcactttttaacctgtttataatcacacattcaagactgtaattacatcttttcttcttctagactttgagcttcccaagaatgggaaacaggcctgagctcatgccccactgtgtctctgtgcctaacacagtgcttgatacgcaatatgttctaaatacattttttatagaatgaatggaaaaatataatagtagcataaaaaaggactatgaaattataaagaaggaaaagaacaattctaaatggagggatttagcaatgctttatgagtgaaatagaattaaaactggtccttccaggacagaaaggctcatatcagataatatagggcaaggctgtcttggaaaaatggactatataaactaaggcatgtgacacagctgaaataagaagttgcccaaaattctcagaatgcctgagaaaacattctaagaatttatgctttagtctgtagtccaaggaattcataaacttttggaatgtgcatacatgtttgtggttaagtgtacacattccagagacactgtcatcacattttgcctgttagaatggaaactcgtgtcaactcattcattcttaaaactctcctaccagtgtcttcccacctatcctcttcgagtcaatggtcagaaaattctagaagtgcatacatcggaaaagagtttactggaaatagttttaaaataatggcttagagtcaaggaatgctctacacccttctactttgccagtgaattgagtaagaaaacagctggtttctatcgaaaaatttactgtagagtgttttcttcatggagaaactagattttggatgtcacgagggaatggaagcgttggagaaaagtattcaaggtaaaacagtagcttgttccaacacaacaggctttcccctaagacaacactctctaaagaagtcctggaaaggaaaatgagaatgtggtagggcggttgatacagatcagtaaggaaatgaaagtccaaaagttatttacatggtaaacatctgtgccaagaggagtactctcaataacagggattagtgagagagcagttggctggagatggaagctcaggcaggtgagcgtggggtgcagagaaaaaaaaatgtatgaagaataaatcaatatttttttgagaatgagtattttagttcagtacttctcaatattttaggtgcatacagatcatctgggatcttgtcaaaacaggtttggctcagtgtgattgaagagaacactgggattctgcttttctaacaagcttcaaaatgctgttgctgcagctgcttgtgggccacatcttgaacacagcagagctccagcctctgcatctgggcccccagatacatgaaaaatgcagctcaggtagtgacaaaaaagatcagtgatgtgggcctttggtgtgttatggtttataaaacagaaaagcctattttcttttcccttaccatttccagggaaaataaagtaatggggatgatgtagaaatcacctgaaatagtctggcacagtgcttgcaaggctgtaggaaccaactgaagtttgctcaaagctttatgtacttctgtttctcacttgtatcacctgttatctttggagtgtcatgttttacgttacatattagcaatggaaacagaaaatggtttttcaatcactcactgtgtctatgcatagaaaggctgggcgcagtggctcacacctgtaatcccagcactttgggaggccaaggcaggccgatcgcttgcgatcaggagttcgagaccagcttggccaacatgctgaaacccgtgtctgctaaaaatataaagattagctgggctctgtggcaggtgactgtgatcccagctactcaggaggctgaggcaggagaattgcttgtacctgggaggcaggggctgcaatgagctgagactgtggtattgcactccagtctgggcaacagagcaagagtctgtctcaaaaacattaaaaaaaaaaaaaaaaaaaggatgccaacaatataatataacaaaatatctaaatgtgtagttgtttgatacttattgactgacttattttttgattcactatcagcagctttttcttaatttggctctttcattgcaaggaactgtaagtcagagttcttagttatgaataaacaaactaaaaagacagatgcaataaaattcaaatgaatttaagaaatggattctcccaggtgcggtggctcacgcctgtaatcccagcactttgggaggccaaggtgggcggatcacgaggtcaggagatcgagactatcctggctaacaaggtgaaaccccgtctctactaaaaatacaaaaaattagctgggcgaggtggtgggcgcctgtagtcccagctacgcgggaggctgaggcaggagaatggcgtgaaccttggggggtggagcctgcagtgagccgagatcgcgccactgcactccagcctgggtgaaagagagagactccttctcaaaaaaaaaaaaaaaaaaaaaagaaaagaaaaaaaagaaatggattctctatctgagaactgatagaaaacagaacccaaagagggcaagacaaagtcaaggctctatcacctgtcaccagaacacaatgttctagactcccctcagccatacagaataatccctaaagccctacacctttgtatacctccctcaaaatgtggtttcaggtgggagcatacaattgcttatgctgacacctctttcagagctctcacccttattctcccaccttggtctgtcttattaaagggtgctgccctgccttccacttaatttgaaatttctttctaatagacatgtcttctacagagatcagttcaagctagtccaattgataaggttaggctttgtgtccctacccaaatctcatcttgaattgtcatccccataatccccacgtgtcaagggagagaccaggtggaggtaattgaatcatgggcatggtttcccccatgctgttcttgatagtgagctctcacgagatctgatgactttttaagcggctcttcttctttcactcatcacttctccttcctgccgccttctgaagaaagtgccttgcttccccttcaccttcggccatgattgtgtttcctgaggtctccctagccatgctgaactgtgagtcaattacacctctttcctttataaattacccagtctcaggtagttttttatagcagtaaaaaaatggaccaatacaccaagtaagaacaacttgtaaagctacacatggaatgattaggaaaaaaaatgtgaaaattcataacaagggagcataaccattgaatgaccatatcatttgccgttaaaccgggccttttttaatcatggaaggagtgtaacaagtgtgaactgattctacaccggacaggccaaggtgcatggtcaccttacctaataagtgtgagccctcctgtggcttatactagagaaacttcttgattcaatagagctttaaaggtatgcattcatggatctccacccaaacgccctgcattaaaatatctgagctgtattgcacttatctgtttcctttaatcccaaaccaactgaatttctctgcttatagtttttgcagtcttataaattctgtgatgggcatatgttgcttactttctcagcaatgacttcctgtgggtgattcacaccctatttctttccatcagcctctgttttctgtttgggttcagagaagttgatttgtcttcaattacaatcagtttctcaacctgtggccacagggactatttcaagaacattcccatgattaaggccacacagcctgaaactcatgcgtgatcatgagcagcttggccttggactgaagacaaagtggagaacacaatcagaaagagaaataaaccacaatcttggtggctgtcaagccactggatcaagtctacacccaactccacattgagccaataaagttcctttttttgtgagtgcagacttagttgggtttttggtttacagccgaaaccatcagaaccaatacaactccagtgttcacagtgccccatattttgtcctgagatccctccacagtcccctttgtttcagaatggccaactgttttcatatcttatttcaaatttaagaaaggaaattcgttggctcgatttatcttttatctccagaatctagtaatatgttgctcatcaacatatggttcggctgctaggtcaagtgcccagccataaaccagcctctggggctggatgggagggctgctgttcttctctgaagacctgtatccattttcctgccttgcagataccagtaggaccagtattaggacatctgcataagatttaattttagaggccgtgtgcagtggctcagtaatcctagcactttgggaggccaaggcaggcagatcacctgagttcaggagtttgagaccagactggccaacatggtgaaaccccatctctactaaaaatacaaaaattagcctggcatagtggtgtgcacctataatcccagctactcaggaggctgaggcagcagaattgcttgaacccaagaggcagaggttgcagtgagccgagattgcgccactgcactccagcctaagcgacagagcaagactctggtctcaaaaaaaaaaaaaaaaagattcaattttatgctgcatattcattatcatctttgccttttgactgtatcatctcaaccacggttatgtatcacagaggcttagaatattataactcattgttttagtttatccaggctgctataacagaataccatagactagctcataaacgatagaaatttatttctcgcagttgtggaggctgggaagcctgagttgaaagcgctggcagatctggcatctggtgaaggcttgcttcccaggtcatggatggccatcttcttgcagtgttctcacatgctaggcaggcaaaggagctctctggaatttctttttttaaataacagcattaatcctattcgtgaaagtggggccctcctaaaagccccatctcctaataccatcacactggggattgggtttcaatatatgaattttggcggggacataaacattcagtctctaacattcaccttttgcacattagagaacgtctacaaagaaaacgttaaattttagttttggaaaacttcctttccttttctcatttttattctttcctttagcaatgtaattattattgtatggaacccgtatctgatgatggtgagtttaaatggatcaaaattattgttccttaaaagcaacaccaaaattttataagatatgctgcatactaattaaagctcaaggagccccaggcaagaaagaaagataagccattgcttaagttatgcaaaagtgtattaaatatttgagattaattaaaatctagagaaagttttttaagagttccatttaaagtttgcataaaagttcacgcaattattataaaacatttgctatcaaactggtttgatgaataagggaagtcaattagtaacatagtgaaataagagttaattcatgtttctctaggtaatttctttcctttgttctgtaaaagtcatttataactacataatagtacaatcatacaataacaattatatgccaatacccactgttttacaaagcgatggaaagcatagttctatggtacttacttattttctaagtgaataatattcttcttaaacccatcctgaaaatttctacaataaaagattcattgatggaaagtcaaaaagtttgatttctggtggtttttgttgttcataaaggaaatgaaagcacagcttttactgagcaggtggttcctggtgtgtgagcccttaatggaagaatgatctgtgtcaacaggactgggaaagttctgattctgacttctgaaattgacctttattctccatttcagaacacataagccacggtatcccttttattatatagacatcgatatgaagagaacaaataaagtcacaccaagaatgtctgggcttgttcatcttacacaatttattatttttgaggctatcacttagtggggaaaaattttcctgcaccctaatgtaaaattgcaaatgtgtttccccagagtaatgatagtctaaaaatgagggacagtgagtcgtaattaggattaggcttgggaaacaagttcacttatattatagcatgttgctatggcaaaaggaaaaatatggtctgattttcaaacaattgactggcaaatgggcttatcccatgccatctattaataatcaatacagcttattcaaaggacaaaagtcactttctctataaaagaaagtgggacaaatttaacaacggtctactttactgcaagttaggatagaatctagaggtaagtaaaaagctttaggtaatgtcttcaagcctcgaagcaccagctttattctcaccggggaacaaagtctaaagaaactttcatgaccactgtgtctgataaagaatgaaaattctgctgaactcagtggtgaacgtactcattattaaacggactcagaaatactgtggttcaaagcatgcttcctaaaaataaaaccaatataatctatgaagaaagatttccaatgccaaaaaaatttcaatgagcattcaaaggttgaatccatagccaccacatgaaatatgatataagcaagtcagtaagagccactgaagtgtacggtttcagagtgaatgtttgtttcccagggaggagaatccaggccttcctctcttctctctatgccctgcctgccctgctgtcttccagcctgcaggcaagttccctgttgctttcaagctggagcttggcaccacaggagtccctgcttgccctctcattcccaccaccaaagcctcctggcagcatttttagctgtgtgggccttatattcaacaacaaagatgaagatatatggctaggagtataggagaaattatgttcttgatatttatttggaatattaaaaagaacaaaaaaatgagctctatgttctacatcacatcatactgtctagcaagatgccttatttttatttaataatttcatttataaattgcctctttacaattatgattgaagactgagaccaagggaaaaagaaggcagaagttacaatatttcctgtgcctgagcttaaattttggcttccagtttcttggaagctttcttacagggttagcatacatctcagctggagtttcccatttagattatctaccagtgtttttgtaggtgttggcttagtatattaccaacattactgcatcaaatttgaaaataattcttcttgatctggtcccagatttgatccaagaagcacatgagtctgcaggatgtattcagactcaaagttctagaatagttatagattgtgatctctccaaaactctctaatctgggtgtcattaggtatttcttgagtctttgctatgccacttgctgtgctgggtggatcactagcagcagtcaaatttccttcccgacccagacatcttatcaaataaagcttagaggcagagattccactagacacacagggccacgagttaatctttgtgaataatttcattgttaactattgggacaaggtacaaaaaacaaaaacagaaacttgctaatggaatacactttctaagattataaattgcaccatttgccaaatgtatactgttagaaatgagagcaataatttgcacttactgtaagtccagcatacggagagggtcatatgttgaaatgccatctctattgaggtgtcataaaaaatatttcctccagcagcacccagtcattctaaggtattaggtataatttttaaagtattatttggtgttctgaataccaaaaaagtacatcttgagtaccacaattggtgacattaaagttaattattttcattaaatattgcagtgctgtcatgaggaatgaaacagaagagcaaaatgaggttagagatgggatgtgttcaacattgctccccaagtatttccaaataattaatgtattcattgaatgatatttattgagggtcagaaaaagtgccatggtatttgatacagcaaaagatcacatttatgatttcattctgtcactttctgcaacaggtagcatccccttgccagcaccaaggcagggttgcatatttgaaagttactccctcaaaaaattcatttaaataaatagatttttttaaagaaattatgaaatactaacgttgcattcagttagtgattttatatggtgtaggattgacattaaaaaatacttgtcattaattttactctgtattaatgttatattaataatttctgaaagtaaccaaccattctaactgcagaacccagctgtggacatgagtttctaggggaggactctgaaattgtgtcaatgtttgtaatctagtcctcggagaatacaaaatttttgacaaagaaggaggttaaggagtgttttctttttgatgttcacctccaaaggaggatcataaagaagtaattcttgaaaagtattgcaatgcagtcttcacaaaaaaagcttatccctgaagtacagaaacacacttaaaaggaacatagatgaaatctctattcaaagagtttgggtttgacctttatgcattacatattatcactgttttgaattaagctattactgtctcattgttattttagcagctaacaaatgagtaggtgttctgaaaagcagtgtttagcatcatgtaaaatgttattttaaaagttcatttccactgagaggattttctaataaccacgtttctgctagtaactcagccatatatatataaaaatattgaaattagagaaatagaaactactgctgtgatataatttgatagaaaaatattaatagatggtagacattgtagagtttctttccatgtagaaatgttacattggaggattaacagcacttttattcattcaaaatagtcacagcatccattctattttaaaatgttaaaatacaaatacaattaactaatgtatttatccacattatctaaattacacaaataaaatatatatttaatattattaaaatatctagggatctgatatgtcctggtatgtctatctaatctgtgtgtgtgtgtgtgtgtgtgtgtgtgtatgctgagatatatatacataaagatatatacatctatagatattgatatagtttggatatttttccccacccaaatctcatgttaaaatgttatcaatggggcctggtaggaggtgtttgggtcacgggggtggatcccttgtcaatggctagggccattcccttggtaatgaatgagctctcactctgtgttcacttgagacctggtcatttagaggtgtgtggcactgccccctcaactctctctcctgctcccattcttgccctgtgagatgcttgctccctcttggcctttttccataagtaaagctccttgaaacctccccagaagttgagcagatgccgtcaacatgtttcttgtacagcctatagaccgtgagccaattaaatctcttttctgaataaattaccaagtcttaggcatttctttatagcaattcgagaatggcctaatagtgtgtgtgtgtgtaactacagtatatatacagtatatatatatatagtatgtatatatacagtatatatatatagtatgtatatatacagtatatatatagtatgtatatatacactatatagtatgtatatatacacaatatatatactgtatatatagtgtgtatatagtatactcatacacacaatatatactgtatatatacacacacactgagcatatattcatccacacatccagtcctctcagccatggctctaccctgaatttatacactatgtatgtgtatatatacggtatatacattgtgtatgtatatatacatactatatatgtaatctgatatatgtgtaactactgattatataattcataatatttaaattcccttatgcaattttttactctgctattatcctaaatttataatcattccataatgaagcaaataagcctatgcctcattcctggggtgtttagaccctgtttagatcctgacagatgcaatgtcttcaattaagttcttttacacactgaagggatagttcaggaggatcattaatactgataccatctaagcagaaaatagtcacagataattaactaaacttaatcgtactttagtatggataccttctttacatcgaggatcaattttaagttcactgaaatggatgtggtaaacatatcagagttacctcctgtggcattatatttgtagtaaatgtagtttttcaaaaccctttaaatacttgaacatatttttaagctcacaaaatactttgttattattgctttggagccaaattttccaattgcaaatatctaatgataattttttatatataactttactgcatacaagttggcaaaagaaaaaaacaacaacaaaattttaacttctttgtaagaaatcaattgtagataatgaatgatcgagctacttttctgaccagtcaagaagtgtgaacagatgctggaactgaatagcagttgctaagactttgcaggccgaccaccaccaggctctaagtgtcctatacaacaggtggagatataaggacttcttttaattgcaagacacatgatgaaaaataaaaggcacattctgtccacccttaaagttctttccctaattccctaaattaggttcttgtgaaatacctgtagttgttatgaaagtcatagaatttaatttataggtgtctcttaattaagttaggttagctagctgatgtttgtttcaaggatcatggaatcggccatgcagtaatttatatgcccaaagaaaaacctgattaaaatgcttaatatgatgaacagaccttgaataatcttcataattatagagtacacactacttacatttttgaagtggttccaaaaccatttgtccactgtgtgtatcttcaaggaataaacaattcactaaacctcctctctatggaaatgtatagacccttggcccatcacctcctcatccttgcagattttaatgcctggttcactgctccatgatccaataaccctcttgtagtattctttggagttttcaatatccatgtagaccattctttcaatgaacctatctctgaaatattggccctcctccattgataccatcctccagcatgtcttaatcactcagttccaagatcatctcctggaactcaacataatcattaactacaactactccataattgtgcttctcatttcctgcagctctctaaattcactgttaacaaaagttacatctatgtcttgttcactcatgtgctcacttcccttccacttagctttagtcccacattctatcattatgactcccttgcaatcacctttgatttctttgctcctctctctttcctaacacttgctcagaaaaacagcaatgctgattaagtgaaacttgtgcttcagcatctccctggggggaagaatggaagaatgtggctggggaaaaccacacacctatgctgattggtctcactttaaattcatagctcctaaccttcagtgggaccctggtgttgcaatcctacttcattccgctgctccatttcctcctctcccccaataccttcaatctacccatttcttcttcagccaattacatttcctagttgtttaaaatacctacttattttcttgttctcttttaaagtaacaatcatcattgctttcactttcttttgcctcattctttttgaacctatttcaaaaagactttcatccccaccatatcagtccctgtcaagtcatcagcaatctgcatgctgctaaatctagtggaaaattcccaatccttaccttcagcagcatttgatacaaatcattccgtctttcttgaaacattttcttgtagttttcttagtatttctctctctctcttgcttctcctcctactaaacctactgttccttctcatttagatgtctcctcgattttctcatttccaaacagtggagagccccaggtttcagtccttggacttatactgcttcctgtctacacctactccctaggagatctcattcaagttccatattccatctgtatgttgacttatctctctagctatatcctctattgagttttagaccttacacacaactgcctgctcccagtcagcacagtctaacaaacatctcaaactctttgtttctaataccaaactaccattaaaaataaatgtttctctctcagttttctccatgcaagtaaatgtcaactccattcatctattcactcaaaccaaaaaccttagcttcatctttcactcttccttttgaccttcacatccagtccaacctatcaggaatggctctaccctcaatttatacccagaatccagtcatttatcttcatctccattgtatccacttctaggccacctgttggatggactgctgcaataaccttccagttgatcttcctgctttcacccatgccctgtccccatggtctaattttagcacagcagccagagtgatacatttcaatgagatgttttcatccccatcccattcaatgtaaaagccaaaggttttgcaagtggaattttttttttttttagaaattgttttcgttttcagatgatgagaataatgcatgttcaatagaagtgtttctaaacgacaaaaaaaaaaaattgttattctccttcttgttccacacaatgaccattgcctttaaaaaaaaaaaaatcactgttcaggattggaattagctaggtaggtatgaaaaatagagaggatttaagttgtatttgcaatattaccatggtgctttacttacagcctctctcattgtggtaaagaaagactgctccttcatgttacagctggtttatatgtaattattttttttaaatcctgtaagaaaactcactcaactctcctgaaaaaccccaaagtgcagagacaaaatattccataaatatctttagaaactccctgatctagcatccagcccaacctcacaatcatctatttgctctccaccccattgtcaaaccaagccatgtggaatttaatatggctacctaacttctggatctttctctgataacaattctcatttttgtatctgttgataaagaatgcttctactgaatccttcgtccatatacccaaggaagggtaaatggaaaatatcgaagagatgaatttttttgaacttcttgtcagcattgttaattgaagatgtattttcctattgatttgatcatgtgttacttgattttgttctgattctcagtttaacacggtatttccatctgaagcttctgatgcatacttcatttattctaacgttaaacagaattttaaagctcaaaaacttcaatgttaattgactgaaaatgctaatctataaattcattttattgtagaaatcttataaggatatgttgtatagttctatgtcatttcccatgaatttaagatttagagattaaaaaatcagtaatttgtaaatggtaattttatcttgagcagaattctatgcctgtaaaccaagattctgtatcagtcagtaatagggctgaatatgtgacgatgtgtacacagggagggtgtactttacctttaagctggccaaatgtgcttttttatttttttaaataaaaaagagcctaaatagaaatcttatctgtaaatattcattggtcctaattatcttttatagagttgcttttaccttactcagttgtgatttcattattaaaacttcaagtcacagaccaactaagtgcttctttggtgtgtgtgtttgtttgtatcatggatatccagaacatttgtcattggatatgatcattataaaactcttgaacatgacttctctgaccgtggatctcaggagctgtacttgaagtttcaaatcagctggcagtcaaaatgtttaataattcctttccaccgagcaaagatttctttcaatttctattctaggagtttgtactttttctaatgtatcctgcacaactaggtccatcaagataaatttctgtgcttaatgtcatgaatagaacagaaaatatgttaaaaagtgatggctccaaaggcatagcattttaatctaaaacatctgtgatttttcttgttcacagaatgtctgcctccctcattaatctgtcaggttttaaaagatctgggaatgaatctgctttgtttaccactatgtcttcagtgtctcacctggggaaaagtttgtgatagatttttagggaataaattagtttttgttggatggatggatggatggatggatgaatactcttatactcatcctgtaaatataagtgacataaaaatcatcacaaatagatgtattgccaggtggtttttgataatcaactgtctcagtccatttgtgttgttataacaaaataccacagactaggtaatttataaacaatagaaatatatttatcatggttctggaggatgggaagtccaaaatcgaggcaccagcaggattggtgtctgatggggattgctcttcttccaagatggtgcctcattgctacatccttcagaggagaagaatgcagtctcctcacatggtgaaaaggatggcctggagaaagagagtgttccatgtattcttgaacccttttataaggatgttagtcccattcagggccctcatgctgtaatcacttcccaaaagtcacacttcttaatacagttgcattggggattaagtttcaacatgaattttggagaagccaccatcattcaaaccactgcaaaacagaaatcagtcttacctggaagtatgtggaatggctttattgaatatgggttctttcaacagatagagataagataaggtcattgaacaatatgattcttatcagagcaaacagaggcaacggtgactgagcatggagatatgtgagaaagtttaacaatagtttggataaaatgtagaaataaaaccaggaggcccccgtcatggagagtttttgaatgttaagtcagagattgggtgttttagtgggtagataaccaatagggaacacaacaaggagtacataaactacatcatattcacattgaaaactgagagaattgaacggcagccacaatgaagtacatgaagagaagtactaactaaaaatagatatttttcagagatgcttttaccatttacaaatgcaggtacatgcactctctgcctgttattcattttccaagagggctccaggcaatcaacctttatcttttttgggacttcaaaagaggacaatgttaaagctgcattagacataccccaactgtttgtttatgatggcttttactgtttatatgcaaacctaaatatgtaaatcttagaaaagaatgctaaaagaaagggtataaggcaaggaaaatctggcaaatttttaaattttaggtttcagttaaattaaaaaaatagtaacattatctttcaaacgtgaaaatttcagttgcaaagaatagtacaaataaatcaaagtaaatgtagatttagttggctcatattaaaagaaatactaatcagtaacagtacagcttgatttgtcattggatgaatgatgaactggggaaattgaggcaatcacaaatagtctagcttcagtttacctcctcatgaagacttctcagaatactcaaacctacaatgaatcctcagcactttgcctaaggcttgagccttataacctactcaataaatatttgctaaatgactttgcccttactaactttgcagccttttttttcagttagtaataaaactactttgtattgttatttgatatcttcatttttcatctagacagtgtaagatgaaggccctctctcacacttttctttcatctcatacttctcatttaatgattaaaattggcaatacaattagcgttacataaattgcattgaattagattgctactgtcttctaccctagaatggaggattcaatttatagttgacctttcttctgaagcttaattgttgtttattattcagtttgttctacggaagttaccactttcttttacataggatttagagtgtatttataagttggattctctgcttttggaacttccattattcacttaaaacagattcatgctttagaaagataaggagacaagaggaagaatccccctgtgttttatgtcctacttttgtaatacctgctcttctaaggttgtgattttgttgctgttgttttatttcagtagttttttgggaacaggtggtgtttggttacatggaaaagatatttaggggtaatttctgacatttatgtgcacctatcacctgagcagagtacagtacacccagtgtgtagttttttctctctcatccccctcccactctttcccgattctccaaagcccattataatattcttaagtctttgcatcctcatagcttagctcctgtttataagtgagaatatacaatgtttgatttttctattccagaattactttacttagaatgttggcctccatctccatccagatttctgtgaatgccattatttcattcatttgtatgtctgagtagtattccatggtgtgtgtttgtgtatatatatatatatatatacaccacattttgtttatccacttgttggtcaatggatatttagtcttccttatttttgcaattgcagattgtcattttttgatttttttaaattatggccattcttgcaggagtaaggtggtatattattgtggttttggtatgcatttccctgataattagtgatattgagcaagttttcatatatttgttggccatttgtatatcttcttttgagaattgtgtattcatgtccttagtccactttttgatgagattatttgtttttttcttgttgatttgagttccttgtaggttctgtcagatgcattgtttgtgaagcttttctcccactctgtgggttgtctatttactctgctgataatttcttttgctgtgcaaaagctttttagtttaattagatcccatttgtttatctttgtttttgttgcatttgcttttggttcttggtcatgatctttttgcctaagctatgtctagaagagttttttctgatgttatcttctagaatttttatcgtttcacatcttaaagtctttgatccatcttgagttgatttttgtataaagtgagagatgaggatccagtttcatttttctatatatggcttaccaatttttccagcaccatttgtttaataaggtatcctctccccactttatgtttttgtcagcttggtcaaagatcagttggctgtaaatatttggctttttttctgggttctctattctgttccattggtgtacatccttgtttttataccagtaccttgctgttttggtaactatagccttgtagtatagtttgaagttgggtaatgtgatgcttccatatttgttctttttgcttagtcttgctttggctatgtggggtcttttttggtttcatattaattttaggattgtttgacttagttgtatatgctagatgtcaaagcaggaaatagatatttggtgtcagaaacatgaatctatttattcttgtgttctcatcccattttccctctcaactcaccatgagccaaatacaattattttctaagtaaacattttgacaaatgcattatatatttagctagaagaagtttctgccttctatgaggtcacagcctaggaagaaagagatttgataatgacccagttaattggcttgattacaaaattttggcttttagttagcagaattcctatttaactggtttttctaaccatctcaggattaacccatctgttcagtgaagatacttagagaaacctgtattctaagaggttattcaaaagtattctcagaggtacatgtgcatatatcttttgccagtacaagctagcaatccaatgggaagatgtttacctgaaaaataaagaggaaaactaatcccctcagcaagtgtttatcaactgtctttgccaggcaccacccaccagtgctctacatgtgatgtgagcatgccctgaaggagatcatagtctagtgcagcaattaaacagtaaagaaataattacagtacattatgatgagtccaactaggacacagaggaggagggagcattatagggtgcagagaaacattcccagagaactcagagtaggtaagatacatgggttgaaggagccgggcacagtggctcacacctgtaaccgcagcactttgggaggccaaagtgggtggatcacgaggtcaggagatcgagaccatcctggctaacacagtgagacaccgtctctactgaaaatacaaaaaattagccgggcctagtctcagctactcgggaggctgaggcaggagaatggcgtgaacctgagaggcggagcttgcagtaagccgagatcacgcccctcctgcactccaggctgggcgacagagtgagactccatctcaaaaaaaaaaaaaaagatacatgggatgaagggaacagcatgggcaacagaaggttaggagaagcgcaggtcatatggtatgactggcttgttgaattcatgattaggttggtttgagcaattgaaaagtgattaatgtcaaccacttctcatttttcttttatttgataaatatttcttcttacatatctggtcacaaacctttaatgaattccatgtaaaacaatcaataaattttcttattctttccctcctgtgacaatagagatggtgtctctctatctcttttggaacctgtccctttaatagcttctgagaaactttaaactataaacttttccctgtatattgcactgctagcttcaaaccaaatcactgccatcagcctttaaacatacttgagtctgtcccatattaatcttgatttcacacatgtgcccctacaacctctgcttctctttacaataaagacttgtacaagagttgtctctagctccacactgccacttaatcctggaccgctccaatctggctttcacctccatcactcaaccaagacagccctccacaaaggtcactaatgaccgccatgtctcttaataaaatagacttttcagtcctctccttgtttttttctctgggatatgtttggcactgtaaatcagtttatctttcttgaaacaatttcttatgttggtttccatgacatcccactcttgtttttctctatctttttgagttctgcctgcccctgctaatttccttttctaggcttattctcctttacctagttggcaattagaagttcctgaaggctctgcactaagcactttctctttgttctttaacttcttccatggatttgatttctgagtactctaaaaactcccaaatttaattcccagtgaagacttgcctttcagtatatctgggtttgtttaacatgcatctcaaatgcatttcccatttcttatatcctgaaatctgacctgcgccccttgttttctgtgtaggaaaattcacaaatatctatcttgtgcattaggtcaagagaccatggaaaactctttaaattgttaaaacactttagaaccgagtttcttaacctcagccctattgacattttgagctacataatttcctgctgtgggggtctctgtgcattgtgagatgtttggtgagcattcctggcctatacccactagatggcatagcaccccctccagttgtgacaagcaaattgtgtccagacattgccaaatagctcttgggagggataaggaggccaaatcagcccttactgagaatcgcagctttagaaggaagataagagacaaagctgtgttttttaaaaaatagaaatcatgctgaagttttctaccaaggaaattattagttcagttgtatgcccaaagtgtatgacattaagtattatttatcaatatcactacttcccacattagctacatgttgtgagtctcattggttatctaaaatatgcttcacaaaatttgcccagcaaagatttgtccagtgagcaccaagaaaccccatttggaccttgctgatagttccagcatatttccacacaatttctctcctctcatcctcctaatctcccaaccacagtcacagtgttttttgaaatcatatgctcctcctgtcatccagtgtcacccagtgttctttctggaacatcctgcccatttcacttaaccccccttcatcctgcaaacacagcccagacatcacctccctacagaggcctttcctaaaccccaaagccctttaggttttcatgcactcttagagctgtgctgctttccttcactggcacttacctaagtttatgattaaatatgcattcgcatggttatttgaatatttatcacacccaatagcctttaacaaggatgtaacacataagctctaaaacactggtgcctggcagtgacatgtatgattcatttcaaaacagaaaggtagataatcaggcacaaggactgctacctggctcaccagcagcacaggacatttgaaatcagcattgcactaaaaaatgtccttgttatagtggccatccgcagagtgctgaatctttcccctgtgtcgtgacgcctcttttatatcataatttttaaatcttcaaccatcatcctctaaaatactattttttcagagttgttaagttccgtgggcgaataatttgcattcattttaagacaaatttgtttaggcgataaatgcattattatttttctctacctcacaatatgacatggattttcaattgaaaattctgcctgaaactgattggagttgggataaagttgtagacaatctatagtagttcatttggtcacagcgtgtttgctttacttttggatcttgagaagaaaggactgttatctgcagggcactctgggacaacttcttggtgataagagtgaagactcatatttgctttgtaaatcaataaaaaagagacctttcaggcaaaagtgttgatgactgaggaggacaagttgtgaattttatattggaatgtaatgttacctatgaaattttccacctattttaggattttcatattttcagatcaatcaaaatttgttgtgaacaaggtttctcctccgtgtcctacgaactacaaaaaaatgagtgcctgtgggtgttttcaaactgcctgtgggtagacagagctatgttactacctggaactctgtgaatgtctaaaagaaagtcaaaatatcaaaatcgaaaaggaacttattttctttgatatgtcttgttgtatgaccttggtaggaacaatgacaaaattttgacatgttcagatgtcttagaacaatgaaattagtatatattaaaatagcagtgctttgttgtccttttaaataatacatgcattttaaagtattcagaagctttttctactttgtataaataccttatcagtcctctaaaataatccaagcttaataggaaaaaaaatgaaggagctttgttgaggcttactgaatgtcacagagcctgcaaggttagaactgagcatagaaagtgaagaaatatgttcttgatgcctattcaactgggtttcctgttcaaggttatgcactctatttgctaatagttgtagtattctgtaccacaattgctgagattaatatcttgagaaaatattgtaccattccagttaataattatgttgatttctattcttcagtttaaagtagatatatgaaaataggacctagtgtgtgaccactcaaaaaccctattttcctcacgtttgtagtgtatttctaaaggcctctccaggattatttcaaaatcaaaattgaaatattgtctaccaagatattgaattaattatgtatctatttcattttactgtttgaacactcccttctaatttgtatatagagagatagaattgtctagcacttttccgaaggaaaaagaaatcaagaataatatttaaaggctcataatatcttccgtctacatgtattaattgtatatggactttaaacaaatacaattaaggatagtcttgttctgcatataattgatttgcctatgttgatgagatgctgacaaccaggtatgaaagctggttttgcttatctaaaagagtggactaaaagtaagttaagtggtttctttagtgttctgtagctttagttgtacatggagcacctgctcctcttggaagtcacagcactttaagtaagttcgccatggtctgctatgctgcgcagactaagctgtgcagactatgctgcccagactcctcttcctcctctttagactgtggcagtaacctaaaagacttggcctctgtttcaactctcatgccacacatcatcttttgtctttcctgtggttcaggtatttgtgtgtgagggttgaggtgggggtgcaccaaattcatacagatttcctcagtagctttattttctgaatttgaggcaacaggacagtgaaaaatggcgatcgttatattgattcatacaacacagagatctgaaggaagcattttgtacaaaccctgctctgggtaacacaggaaatgccaagattttgaaatgtaactttcttggtcttgaagaccaaattgtgctcagaaaaggcagagtccctataagttttgtcacaataaatgagtagagcccactgcaggttggaaatctacaaatcattgcagggtattattaagataataactgcacgagagccatcacagcagcagaggtaaggatctctgccaagattcaccttagaccggtgattctggaacttgagcaagcctagactcaccaggagggcttgattgctagagtaggagaattttccccgtcttacatataaccaggtgatactgaccacacttggagaatcactgccttaggcattaggatctgagactatatatccatggattgcagcaagaagcagacaaaaacatttcttcatacacaagaatgtttgtgacttagcaaggctgttattggagacctggccattttaggtagttttgtataatttgccttattccatccaatgttctaatttctaatgtttataggctgcaagcctagacgctactgttgtgaaacagttaaacacgttgggtgtggtgccgagctccttcctaggttatcaaatccaagctctgccatttattaattgtgtcattttgaggcaggtatttatattcttagggccatggtgtcttcatctgtagaataggaataatagcacctattgctagtattgctattaggattttcaaaataacacacataatgcattggagaaagtgcctggcaaattataagtatgtaataaaacttatctctctttttactccttatttcttattacagtggttttgtttttcatttcttttattttttggatagttaaaccttataaggatttaaaagtttcatgtgaccattcaaatatcccaatttatcatttaaacgtaaacaacaatggtgccagagtagtcatggggccctctccagcttcatcctacagaggagccccacctgggcaactgaaataagattataagctactagaagaataaagaggtcttatttcattatttaattaagccgctgaatagtttattcttcctaaagcaacatcacatataccaattaggttagatacccttattaactagccagggaaccttctctcttgaaaaacatcaacaagaagtttttgttgttatttttgtcattcttgtttggttcaagaaatataattaaataaatttattccagaaattttaaatttcagttaaaaatttttaatttgatgttatatcagagttatgaaaatcatggctaactataatatggcctgagaaaatccacttatttcaaaagggaataaacagactaaaaaacaataagaaaacaaaaagcagatgagtgtgaaaattacaagataaactcagaatacacctggtcaaagcaaacattacactgggcaaagttacataggcaagagaggctttattcaaaactattgtaacagaagagagaggctgtaactcagcctgagctcaactccactgaaacaaagggatgaagagtttttaagagctgggatgggagaatctgtgtaggccatttgtgcttgctaattggctttacccacagatgaagtaaattttctcctatcttcatgacaggaggtagttttacaacttagagcaaggctctttgaagttaggctcccacccacactcaggtgtagactgtatccctttaatgcttttatttcaaagtgatggctcctgggtgcttaaggaaaacattccagggttttaaaactgacaagaagctttaaaaaaaggtttacatctcaatcgggcaaagaaagagtttcaattacttgttttctaaagtaaatgctttaagaaagggaagttagggacctagagtcaggaggaagcctgtataaagtttagtccagctgagggaactgctaaggccatcttggtctcggtgaacacttggttttcacatagttttaatcacggaactagtatgtggcctggacacacttggaaagaagccaacaccagagggattgctgatatactgtgaatatctaattcctacatttatgataatgaggtggaatgaaataaagaggagacagtgtgaaattggaaagtatgtagtttgatgttacttgcaagtatactgtgaggcccaatttatgacactgggctgcatagagctttttctgaaagtccatctagctaaaccctgtcctttaaccatatgggccaaatgacttttgctttattttattttagggaattttctttatttgtaacattcctttcagctctttttagattctaatattccagaatgtcttttttccagtgtaggttcttggcatctttgtccaacatttcatagtaggtgtataaatttgtttttggtttctgaattctattccattgatctgtttgtccacttgaatgccagtaccaggccattttggttactatagctctgtagtataatttaaagtcaggtgattcctccaattttgttatcttgctcaggatagctctggctattctgggtatttttgtggttccatacaaatgttaagatatttttctatttctgtaaagaatgccattgatgttttgataagaattgcattgaatctgtagattgctttgggtagtatggacattttaacaatattgattcttccaatccataaaaattgaatactttccattttatggtgtcctattcaatttctttcgtgttttatacttttcattatagagatctttcatttccttaagattgatcattgttggcatatagaaatggtactaatttttaatgttgattttgtttcctgcaactttacataatttatcagttctaatagtttttttgtgtgcagtctttaggtttttccaaatataagatcatactatctgaaaacaaggataatttgacttcttccattccaatttgaatgccgtttatctctttcttttgtctgattgttttatctaggacttccattactacattaaataatagtggtgaaaatgagcaacttcgtcatgttacagatctcagaggaaaggctttcagtttttccccattcaatatgatgctagctgtgggtttgtcatatatggctttcattatgctgagatatgttccttctatccccagtttttgagagtttttatcataaaaggaatgctgaattgtatcagataatttttcagcatcagttgaaatgattatacggttttggccttcattctgttgatatgatgtatcacattgatttgcatatgttgaatcatccctgcatctcagggataaatcccccttagtcatggtgaattattttttttttggtttgctattattcaggatttttgcatcaatttttatgagtgatattggcctgtagttttatttttttcatgtgtctttgtctggttttggaatcagggtaatactggcatgatacagtgattttggaactatttctctcttcctctattttttagaatagtttgagtaggactgctactagttcttcattacatatttggtagaattcagcagtgaagccatcaagtcccgggctttttttactgggagactttttattatgcttcagtttcattacttgttactagtctgttcaggttttgaatttatttgtggttcaatctcagtaggttgtatgtgtctgggaatttgtccatttttttccctagatttttccaatttattgacatatagttgctcatagtagccactgataatcctttgaatttctgtggtattagttataatgtctcctttttcatcctgattttatttatttgcatcttctctctttttctgtagtctggctaaaagtttgccaattttgtttaacttttcaaaaaaccaactttttatttcattggtcttttgtattgttttcttcatttcaatcttatttatttctgctttgatttttaccattgattttctactactaatcttgtgtttggtttgttcctgcttttccagttctttaagatgcattgttaggttgtttatttgaagtttttcttattttttgatgtaggcacttatagctatgaactttcctcttagtactgcttttgtcatataccataggttttggtatgttgtgtttccatcatcatttgcttcagaaaaattccaattttcttaatttttttattgacccactggttattcaggagcatattgtttaaccatgcatttgtatagtttccaaaattgctcttgtcattaatttctagttttattccattgtggttagaaaagatgctggatattatttcaatttttttaatgttgtgagccttgttttgtgacctaacatatggtcaatccttgagaattattcatggtctgaaaaaaagaatgtacattctgtagccgttggatgaaatgttctgtaaatatttattagatccatttggtctatagtatatattaagtctgatgttcctttgttgattttctctctgaaagatctgtccaattctgaacgtggggtgttgaaatctccagctgttattgtactggggactacctctctctttagctctaataatatttgctttatatatctgggtgctccaatgttgggtgcatatatatttaaaattgttatatcctcttgctgaattgacccctttatcattatagaatgacctttgtttcttatagttttaatcttgaaatctatgttgtctggtataagaatcgtaactcctacttttgttttggtttccagtggcgtggaatatctttttccatcccttcattttcagtctacatgtgtctttataggtgaaatgtggcaacagatcattgggtcctcttttttcatccattcagccacttcttttcattggagagtttagtacatttatattcaatgttattattggtaagtaaagacttactcctgccattttgttctttcttttttgttgttgttttgtggtcttctcttccttgtttccttcctgtcttccttttagtgagggtgattttctctgattatataatttagtttcttgttttttattttctgtgtatctgttgtgtgtttttttacttctggttataatgagacttgcaaatactatcttatagcccattattttaagctgataacaacttaacatcatttgcataaacaagcaagcaaaaggaaaactaataaaagctctacaccctaatttcgtcccctggtttttaactatttgttgtttctatttatatcacactgtaccatatgtcttcaaaagtagttgtagttattatttttgattggtttatcatttagtctttctagttaagataaaagtagtttatacatcatggttaccatgttatattctatttttctgtgtacttactagtgagttttgtacctcttggtgatttcttattgctcattaacattcttttctttctgattgaagaactccctttagcatttcttgcaggacagatctggtattgatgaaatccctcagcttttgtttgtctgggaaaaatctttatttcttcttcacgttcgaaggatattttcaccagatataccattctagagtgaaggttttttcctttagcacttcaaatatgtcatacgactctcttctggcctgtaagttttccaataaaatgtctgctctcaaaggtattggagctccgttgcatgttatttgtttcttttctcttgctgcttttaggatcctttctttatccttgagcttttggagtttgattattaaaagccttgaagtagtcttctttaggttaaatctgcttgttgttcgataatcttcttgtacttggatattaatatctttctttaggcttggaaatttttcttttattgtgtctttgaataaaccctctacccctgtctatttctctaccttgtatttaaggccaataagtcttagatttgcccttttgaggctactttctagattctatatgcatgctttattctttttgttttcttttgtctcctccgtgtattttcaaacagcctgtttttaagctcattctttcttctgcttgatcaattcagctattaaaggactctgatgcattcttcagtatgtcagttgcatttttcagctccagaatttctgcttaactttttaattatctcaatcttgttgttaaatttatctgatagaattctgaattccttctctgtgttatcttgaatttctttgagtttcctcaaaacggctatttgtgaattatctgtctgaaaggtcacatatctctgtttctccagggttggttcctgattccttgtttagttcatttggtgaggtcatctttttctggattgtcttgatacctgtagatgttcatttgtgtctgggcattgaggaattaggtatttattgtagtttttgcagtattggcttgtttgtacccgtccttcttgggaaggctttccaggtatttgaaattacttgggtgctgtgatctaagctgttccttatttagggagcaccccagtaacactatggttcttgcagactcatacagattcatcttgatcgtcttaaagaagacctgggcgaattctctggattatcagatggacactcttgttctcttcccttactttcttccaaccaaatgtagtctctttctctctctctctctctctctctctctctctctctctccctccctccctccctccctccctccctccgtctctctctgttctgagccacgtggagctgggagtggaatgacgtaagcacccctatggcaaccaccactaggtggacctgaagccagcacagcactgggtcctacgcagcatctgttgtaatcactctctggctactgcctatgtttcctcaaggccctgggactcagcagggggcaaaaccatctaggactgtgtccttcacttcagggttgcaagttcccctaggccctgggtgggttcagatgtgctgtctgtgagccagggactagagtcaacaaacttaaatgtctactttgtcctcttttgtcctgcagctgagctggcactcaaaccacaagatacagtccttcccactcttctctcccctttccaaaggcaaaggagcctcagctcatggccactgccactacaggtcctcagtgaatacttccagcctaccaaaaatgttccattgaggtccaaggactcttaagtcagcttgtggtgaatgctgcctggtttgggactcatccttcagggaagtgggctcccctctgaccctggaaatgtttagaaatttcatccaggagccaagtgctggaattagggactccaagagcccattttgtgccctactctcctgtggctgagctggtacctaagatgcaagatgaaatcccctttgcttttccctctgcctttcttaagcagaagtctcaccccatagccatcatagctggaaaagtgctgagtctcacctgaagccagcaagtgtgaatctcacccaaggccctcagtgtagtaccaggtattgctgctggttatttgagcccaaggacacttcagttaccagggtgaataaatcctgtcaggactgggtcatttccttcgaatgagaaggttgctctctggcccagggtatgtctagaaatgttatcttgcaggtagggcctggaaagggggcctcatgactctgactgctgccctatcctgctatagaagagctgctatccaagaggcaaaacgaaatcttctccagtcttctgtctcctgtcctcaagcagagaaaaggggtctcttttggagcagttagttgtacagcctggaattaggggagaggtggtgcaagcactcctttagccaccctggatagcatctcaggaggttgtgtgccccaccctcacccccagtcagctgggtttgggcccagttcagcactaggacttaggagttgcggtcttcatggcctatactgcctttcaagattatttagggccgggcctcagggcactttagccagcagtagtgaggcttgtgggaactcaagcactgaccactgggatcagtgattcccctctggctaatgctggtttaaatggtccctccatgggtgggtgtcagcggagtttgatctggttttcctttctgctataacaggacaccactgagtccaatgactgaaattgctgcacgctgtctctctcctcagcacatggaaatgctctcctcacccatgctgccactgcctgcaggtggtggaggggtgtcgtcatggcaattagtggcaatagtcctgaataggcaagtaaggactatttttttttctccttctgagtgactctttcaataataggaagttaaaatccagcactgcgagtgttcatttggtttttggtccttaggaaagtgcttctctctgtagatagttgttaaatcggtgtcctagtagggggatgatcggtagaggcttcttgctctgccctctaatttgtaacatttttttagctctttttagattctagcattccagcatatggcaacattttaagcattaaatttctgtataggccttccagacatgggtaagtgtgtgtagagatatgtttgtgactttatgtttcctttaatatgcaatttcacatttaccaatcctaaaacattaaaaagagcataatccaaatacagtgttcaaataaacactgcagttatttgttagcaaagcaactggctgtgattctatttcaggaagattatctcctccaagacgtagaaatttgccagctacatttgtttgctactgattcctgagtttggtttgctttcattcttctttggatctcagtctcctatgcaccattcacattttctattcccagtaaaaaggtttttgtatggtcttggttttgttcctatcagtcacttaaaagaacagacacccaaaggcaagggcattaatcatctgtttgaaggtccctgggaaattattatttatatgttgatagtgaatctattttaccctttaaggggcaaaattgctagattaggaacatggttaggaaaacatagcagtcattaaccttatcgcttttccaacaaagaaaaactgtgtaacaactggccaaagcccgtggcaatttgagaacacaagagatcaacaaaatgaagcccaagatgagataaaacaagttgccagccttttggcataggtttaaaataattttctgtaaacacctatcctcaaaaatggaaatcagtgaaaatatttcataaaatggctagagaattctaaagcttacattatattctttagtattttatataagaaaaattttgtttgctttagaaatttcataacgtatttcttttagtctaattaaattttctttttttttttttttttactagcatcattccccttagtcactaagagtgaaattaaaaccactaaattttatttttttaggttgttggaattacaggttctctgaaggggttgctctgcatagattattgacaataaatatgttccaaaaaactccatgccaatgagatgagaggaattattgggcaagagccaaagaggaaccagggagatagcaagtgcaggaggaaagcacaggtatggaaagtgagtgaaagtaaaggatgatgtattagtccgttatcacactgctataaagaactacttgagactgggtaatttatgaagaggtttaattgactcacagttccacaggctgtacaggaagcatagctgggaggcctcaggaaacttataatcatggtggaagggtaaaagggaaacaagcacgtcttcacatggtggaaggagagagaaagagtgaagggggatgtgctacatgctttcaaacaaccagatctcttgagaactctatcaggggaacagcaagagaagaatccgcccccatgatccaatcacctcccaccacatccctcccccaactatgggattaaaattcaacatgagatttgggcaaggacacaaagtcaaaccatatcagatgactagccgaatgttaacctgatctgtcctctcagcagggacaggtgccctcctgctttatggatgatttaaagttattataacagatggtggtgcttcctttcatcttttactttggaattttagcattaatttaaaaaatatttcctatgaaacagtgagacaataatgctagaacattctagtggttcataaagagcctttacaggtaggattcacttggttagggcgccacattacagatttgatcccaaaattgtggatctagaaattttattttcacatggtattttatgtgggttagacatattagaataccctgcctcagtttccttgttggttgttgtggacaaaaataaatgtacttagcactgttttgaggataaaggtgttagaacactgcttgacacaaagtacttaacaaatgttagttgtcattcttagttttattaacattctcaacaggcatatgctgatttattagcttatgaaaaatacatttaagtgggtccagaattattttattctcctttcagaatactctgttcatgataccaaaataactgagaagctgcattagtctatctatgtttctttccttctttctctctttttcttctttctttctctttcttctttctttttggagacggggtcttgctctgtcactcaggctagagtgcagtggcatgaacatggctcagggtagccttgacttcgtgggctcaagtgatcatcctggctcagcctcctcattaattttaagatgattctactatggagaaaatttaaagagtgatcaaaggttctgagtggttgtaggagatgttttatttgggatctgaagactctgataaatcgcctaccaccctacacctgcataccatcacagaacagtccacaagatgtcagttgcacaaggatcagggcaagacacacttgctctttgtttctttcttttttttttttttttttaacctgtgagtctctgtatgtctctctcttgctgttgctctcactgtcggcctcctctctcctccccccacccctcactaacttttgagctatcatgttttgtttcctagattccaaggtggcactcttccttcctaacatcctttttaattccacttatgccattgcttatgttaaggtttcctgcaaatgaaatgaatcgaaatgaaataggatcaatttcttcttgcttttagctgggagagtccttaagtgtatcactgaaagtggttgctggtttgaaacaatatttttgggttatctggggccataagtaatgacatttgatttgtccacatcatcaataatggagttagtagtagactgaggttcaagaagttgaagacctgagacccatatccaagttttccactgtttacaaccacgactgcgagaggacctaactgttgtatcttccttacaattagaagagacacaacttttcccaagaacaccacctcaagagactgtttacattattgaattagactaagctttaacatacagtgagtattcagttaaattatttctcttcacatcagctggtagggacttatggtgagtacaaaatcagctatgggcaaagtttaaaatgttatattttctctggacattaattataatagaagatacatcttatgctttccacataaagaagtagcatgttaggttaaaagaattttagggtgtctgataagaaaatcaaggtcagtgtgactaaagaagagttaaagagaggactaggatggtttatggatgaagagatggcagaggctgcatttcacaaagccttgcagactatggtaatattttccattttattccaagtgcattagaatgccaagaaaaggcattaaagaaggaaagtagtacaatcagatttttattttttttaattactatgacttctatatgaagaagagattcagaagagacagattcagctgtgaactagataaggggcgcttatttcaaccatgatggagctagtagatgcacacaagtggacagatttcagaaagttttagagaatgcatgcgtaaatagcttccacctgcatgctcttgtgtacatgctctacatgtgaatatatagatctacttacatatacatatgtatgtttgtatatagatatgtatttgtttaggaacatacttagaaaagaagatagaaaaacacaccaaaatatttacagtgacttcaatatttaaggttatagtatttggggttatgtttacttgctggtttgttttgagatggagtctccctctgtcacccaggctggagtgcggtggcacaatcgtggctcactgcaacctccgcctcctgggttcaagcaattctcctgtctcagcctccccaagtagctaggactacaggcgcgcgccaccaagcccagctaattttttctgtaattttagtagagacgaggtttcaacatgttggccaggctggcctcaaactctggacctcacgtgatctgcctgccttgggctcccaaagtgctgggattacaggcatgagccactgcacccagcctatttggggtaatttttgctgccttctttacaatttttcttttcttaatattctacaatgaatatatgtaaataaatatatatagtatatatagtatatgtacacacttgtgttaatgaggcattatggaaattaaattataaatatggctagtatcaagaaagtcctaattcaagtttcattacaaaaattgtttcccactactcaaatatgataaagcacttttaacataaacaatttttataggcaaattattgtgttggaggccctctcaattggttcatgatcatgcatagctcctaaaatataagaaggtaacaatttataatacaatggatttcaatcgatgccctttgccattaaatcacactagaattcaatgacacaactgattaacaattaaattaatggtggtgaccttgcaaatgaaaagtgatatatagtatttatattttcctcatcttccctctgtttctgaaaatgtaaaaatattcttttaatgtttgtagtttttaatcttaaaaacacaatgttgaagaggaattatctggagagtgctagattagagtcaattaagatttccaaattaaatttttaaatttataactagagagatttttaaaatgttagcagtattttttccccagattatctatctgcataagattctagagaattctgagacattcttcttgctttagagttgggtgctacataaacattaatcagtgctaagtaaaaacaaaccaaatatgtgtgtgtgtgtatatatatatatatatatatgcacccccattgtttagtatcagtaaattttactagaaatactgaacaagtatatggcaagcaattgacaaaaatattggttcctgatctccttttaaatagtatctatgatgctaaataaaaagtgttctaataatagaggaaatattttcatattttaggtcatatacatatacacaacataatagggacggggagaggcatcatgaaataactcaaggtagtatactatctgaaaatttatacttatgaaaatttatgttataaaaataaagttaaattgcttttttaaaattgctttagggtttagctctctgtctacatagttggcaaccttgggtgacttattttattgtaatctattgttatgttaatttcccctattgctacttgtataatttttatatacataaggcctcaataaataaactctttgaataaaaaagaaccctaagcatctttttgcaaatagttctaaatcatgaaaacactaatattttataatgctctaagaagctaatgaaccagaaatatctttaaccaaaggcacttttcctttggttttcacaaagcagagaatcctaatggacaggcaagataaatcatttactgtgtaaaacactcatatacctattgaaagggtaaccacatcaaatgttctctggctatttaaattacctacaaaaagaaatcttagcaaagtgcaaaatgtgatagacatttgcagtctatctgtaactagcccaattccttcaaagagaaatgtgaacataaaatgcaaaagcatgactgaggagtcatttcatgcattccttgattcctcagaatggctacaagcaacgttctcatctagtgtggggcctcactatgcaaatctgccaaggttatccccgtgggcaacctacaaccaacgtgtctttgccttgggctcagtgagttgactataatggttatcctggcaagacggagctgatcctctctcagaagtagacgataagatattatccagctaaaagttaaaagtggaagacagcttacacttcaaggactggagaaatcaaattcagtaatgccatttctcagaggaagtctcagattaaggacatagacaataaagctttatataaggaaaatatttgtttaaggttgaaaaggctaagatataaacatccagtcagtttgatttaaggtggaaaaaaaagaatctaattcttagaatggagctagggatatcagtggaaactcttcttccctacacaagtgacttgacatgtttcttgtttttgattctaaagttgttttagaaattcagatgtgaaaatacaaacattctctgcttttttctcccttgtagctttgattcctcaatattcaatttgtcagccaatcacattaactctatgtccaattgatttcccatatgcctgctttattttctgtggttaccacttcgggacatccttctcacttcaatccccattcttctgtggtaggcaaaaatttgtaaatcccccaaccaagggtgtcctgtcctgatccccaaaacctgtatttatgacaagatatcactcccatgatcatgttatagtatatggcacaactgactttcagattatccaaatcagccgaatgtaatcacatcactctataaaagcaaagaacgtttttttcccactggtggaagaagagaaagtcatagagattagaaatatgagaagcactcaaatgccattcctgacttgaagttggagatatccatgtgagatgcaatatgaggagcctctaggagagaaagtggccctgtctggctcacattcagccaggaaacattatcctcatgctacagcaataaagaactgaatttttccagcaacctgaattaccttgcaagagagtttttccccagtgccttcaaatgagaacccaccctaaccaaccttgatttcagccttatgagaccctaagctgagaactcagccaagctcacatggactcctgacctatagaaactgtgacataataaatttgtgtggttttaagctgatgagtttgtggcaatttgttatacagcaatagcaaaagaagataccttcccacctagccatattcatcagatcagcctttataaatgactccattcatcttaacatttgactatgtaaaaatctacaagtcttctcaatgtttcagaccaaattcaaaacctttattttgactttaagatgccagtaaattaataagccaaagtttcttatcctaccaaaatttttactattcttgtataaagatgctcctctaatactttgttgcatttgttctcccatttgtcatgttataattttctatgtatttgtctgtcacctccattaaactggacattaattccttatattctcagtacctaggacatcacttggcatcagtagatctgtaatcccactcatggatgaaacaactccacattaaatccaggccagacccttactgttctttgaccaggccatgcagagctcctgcctctttgccttggctaatatgcttccctcagctggaatatctcatttcttccactatctaccaacgtgctgagggaagagtcaatataagacagtcaatatacgggtcctttgttgaggcaaaaaactactctggattaatgtctccttacatgattgcagaacacaactaaaaaatctgcatagaaacaagagcccactagtctggagccatagagtctccttgacactgaaaggatacagcccttcggggatatgtttgtcaatttcttaacaagtctatgaatttcttgagtaaaagaaccacattttctattttttggataccactaataatatctcgttggcatagaatatatgcttaaggaaccaaatttgcacttaagcttcacaaatttcagacaacatagcaactggtgtagttatcttactgctcactttgtcactatttctttaattcaaactccctccctgccttgacttaccaaactgaagctggatgggagaaacagtgggagtaataatacaactagggcccagagaaaactttctcaagatcacgtagctagaaacatactggacccaggattgaaacctgtggtttctgacgccacagctctgcccatcataactcccacaccttcttgcctatccccacccaactcccagtccctaacagtctaggataagaatcctttgtattcctacaaagaggttgctatgatttgaatgtttgtttcttccaaaaaaaaaaaaaaaactcacattgaaatttaattgccattgtaagaatattaaaaggtggaacctttaaaaagtgactgggtcattagagctccaccccgctgggtaggatatgtgctatgacacagggcaagtttggtgacctcttgccgtctcttgctcttccaccatctgcaaggggaagaggcaacaagaaggcccttgccagatgctggccccttgatcttgcacttctcagattccagagctgagagcctatacagttccatctattacaaattaccccgaatcaggtattctgttatagcagcagaaatggactaagatagtgtataattcatgggtagaaaaataatgaaatgacatgagtgttttgagataggctttcgactacaaatattagagacaaaccctaaaaaggattacatagaactatctttatatgaatacacatatcagacagatagacattcaaacttcctctgtccaagtcctatacatgccactccttagtattttcagattgcatcttagagaaatcattattttatatcaaaaagtagctggccttgacagagtataatcaggttcacagtttatggttctactgtgattaaaattagaactttgatgcttgttttatagatgagaaatgaccttcatataatgtacattgttagtaaatgatttctaaaaccacctagggcatttctttaaatctaattaaaagcacaatttcaaaacaagcagatcaaaatgtttcctataaatcagcctggtgtagtactaataaaaagtaataaggagaaaatattttaatatttacatatgaaaagaagttcatgctaaattttacaaaaggcagttgtacctgctaattggatgtgttactaaacataatttatgcaaagaattcaccttttggtgtaacctaatatatatatcagtcattacattacattgatattgctagattatggtggggatcaggtctccctagcttactgcctgatatgtaagtatgcaagaaatgttacagaatggagatagaaggtaaagaaagacaaacgtagagtaatgtggaaaggaaggggacagagtgaagggagaaaataaagaagacagacaaagaatataaaggaatgagaaactagaaaaaatagaatgggagggagggagaagaaagggagggagggggaaggaaaggaggaagggaagaagtagaaacagaaagggagaaaggaagaaaaaagagaaagggaaaaagagagaaagggaaagaaggaagatgtgagaaagtagaaaagggagagaaatggaaggcaggcatactccttgccctctttttccctttctcctgctggcaaagcctgctcctcagccagatgaaagatttgttgtcttaagcatgccatgttctgcaggtctcatagctgcctatttataccaacccttttcctcctggtaaacttctcctcattgttaaacattcaaacagtagtgcctcccctagtccaggtgcttcaggaagaatcagagacaccggccttcctgcttccctatgacttctgctgtctcagagagtcaagtgaagttaccattagatacttttctcattattgtgtacctgttgctgtagtgataggtggtctccccattacggtgtgatctccttgagtcaggaaatggtctcagcactttgtattcctagattcttgcacagggcttggttcacaggaattattcaataattctataaattatcacattcagttctcacaactaaccatgtgaattaggcgttatattctacatttcaaaagagaataaacctcaattcagattatttaagtgacttgtacagtaacactcgtgtaagtgagcctgaaaataattcttttgttttcactgatgagatctagaattgaaataataagttctaagaattaaagtacaacaaactcccatgacacaagtttatccaagtaacaaacctgcacttgtactccaaacttaaaagctaaaaaaaagaaaatgccaccaaaagttctttaatgtatttttaaatgataagtggaaataaggccaaattgtggctgtttcattgtgaatttttgagaattgtattcttcccacgtatctatatgagaaagggaaaatttgtgttaatttatgaaacagaaacctaagatgcgccatgttctcttatttgttatttataggaactggcttataaaactggggcaaaaataaaataaaaattctacaactgaaagcatttgcatttgttttagacatagagttttacatcaactaaagatttgtgaatttttggtgtgttctttcatatattaattcaataaatgtttcctgcccatatatgctaagtaagcactgactctctgtttaatcttactttagtttacacttgttaaaatattttcccatgccatacatttctagttcaaacatggaattaattttctttggtggctttttgttggttttccaatcttatattttgtttattttgcaataggacgtcgagtttaagtaaactatgtgttcagccaaggttatgcattcctcttgttttataaattgtcattattcatacaagactttgctcttttctactgtattatacagtattttgtgattttctttattttgtcttataattacagtttgggatatatattcagtatatcattttatatttgaccaaaatcacaaatctattaatattgctaagacagttttccaacagagctatgatttccgagtatttgccctataacttcaaggatacaataaaatttaacttaagggcttaaaatctaagcagaactggtgctgtttcatcaggcaatgcattgaatggtttataaactgaacatgaaaatgtctaaaagaaggcgtctcccagagcccattaaccttcaagacgccttagcctttctctttttttttttctgacatgagtaaagtgaacaggattttaataaaagtcctgcagcagatattcctgaaaggtcagggctcatgataaagctgccagcactgcaactttaagaaaagagatcccgacgacctttaataacactaggtctgccagtgctcattgtagaggatctgtattttaaaattccatttgagaaactgactcccccatttgacaggatcatggtctttaatcttacttttggtgtgtaagagctggcggtatgccccatggaaacttgcattttgtatgcttctgaggaccttgggaaataattttctctagtgatagaaatgcttccccgtcttcaactttgactttctgatcacccatttcattaatactaagtacaccatatctgaaagtagaaggaatttaatattgaagaagtagacttgattcaccaaagcttctatttcatttattttcattttcgttccttaatctctcttcagctttttatagattgaataactctgaaatcaggaattagtgatatacaacagtaatttccacatctatgttttcactagcagaacaaaggtacaattattactaaaaatatatttgttattataactccaatttaataaggggtaaacaaagactttaaaaacttcagtaagttgctcgagttaacataggtaataaataacaatgccagaatttactgttttcagatcactcagtttcaaaacctcatacaatttccattctctaagatgtacatctacatttctgtcttcatcatctcagtttaaattaaattaacaaataactctttggaagctagaataacattatgagtaaaaagtaaaatcttgatgtaaactattccagagaatagaaatagagggaaactttccccattctttttgtgaagtaatttcatcaatgaaaaatctggcaaagaatttaccaaaagaaagcaaaaacaaaaacaaaacaacaacaataacaacaactcagaccactctcaccagagtgccaatcgaaagtcttcaataaaataacactaaataaaattgaataccacattataaatgatatcacaccatcaagtgaagattcttctagcaagccaaggccgttcaacactaggaagtctaatagtataattcacatcataataatagagccaatgagtaaagcaatatcataatctccagagatgttgaaaaggcatcagacaaaattcaatactagtaatttaacaaaaacaaaaacattctgtaacataagaattgatgaattgatgactcctttgtaaacatgagagtgtacttgtatgtatgtatatgactatatttgtatatatagttttgtttatatcttcatcaaaagccatttatatctccatcaaaagcagtatttagccagcatcttccttaaaggacaaacactagagacctttccactagaacaagatggtgctacccactgtttttactgtgatttaatattatattggagatctatgacaaagaaagcaattagaggcctacaacttggggagacagagctagaactacctctgcttacagatgatattattagttacttgaaaactgaaaagtatcaatgaaacaactagtatatagaaagagagaatttaagaagatggcaagcataactttaacatacagaaatcactagcctacatgtaattacaaacagttttgaagatattatgaaggtgagcagaaaaccttttaaccttaattccaaataatagtttttcaattttttttctttcattggagaggtggggcaagtgtgatgtgtgcctagaacaatgagattttgtgactcagaagaaaggaaagaggaaacatctcagtagagaaccttgcatggggaagagggaaatttgttgctgtgaagcagtactttagaaaaattaatcacagaaaaaaatacaactagatactttagaaaaattaatcacaggaaaaaaaatacaatcaggatgcgatgagaacctgaaaaggtgaagcagcagtgttaatggaatggacgggataataggagacatttaaaaggatcaaccatattaatggctggaatcaaacatttgtagaaagaagtaaatcaattaaggcagggacagaatgttaaccaggaggtctgtataatcatttggtgataagtgtagaaacaccagtaaaaggagtgctatagaaattgtggtcaataactattccactaagagtttctactagttcacatctcttgatgaaaatcatttaaaagttacaaagtagtcaggccttcgatatgaattcaaaactaactggaccagtacttttcctttttttctgatattttcctttgttctcatatgtctattccaaaaagccaaatataaatgcctttcatttcactgtgtcatgctgagaaaggcaagatgaaaagggcgagaacaaagaaaaagaacagatgaaaaagtaatgttggaagttgtaaaggagttctctgggcttttttcccatcacttacaagttggaaggtgaaaattaaagctcaccagacatcaagaatgtcattttccttcgactcaatgtgcttccattttgggttctttgcagttgtaacgctcagccggaaattcttcttccgccatatcctacatcgctgatcacttggtcaaatgccacatcaccagaaaagcccatctcccactgttctgtatcccctgaaccttgctgtatttcccactgtagcgcttactgtatatttagttcataatttatctcctgtcgtgagactacaaagttcaagatatgagaggttttttttcctgtttttcttatattcccttcgctgttgcattctgagagcctgaaactgttatctgccatatgataggcatccacgagatattggttaaataaatgaatgaacaaattaatgaatgagcaagccctagaaacagtattctacaaagttcttacaattatattttattttgtaatcaagacaatttcaagaaagaaaaaacaattagagcattttccctttaaaaaatactaagcaatatctatgctacatagtttattttcaatgaatcaacaaaaaaaaaatctgatctttcttgaattcttgaagttgaccagttttttcaaaagggaggcagtgattagttttgggtggccacatctcctcctgcctgtttccagctctttctctttgtattagggtatttctccttttcattcagactcacatttgttaagcttcaaagcactccatggtttattatggatttttcactctaggaaagaggtcatcactttattaaacattaaataatggtgataatcaataataattgatatattgtctctattggtactatcagaaaaaacaaacataagcatttcaggttactatgtgcatcaagaattctaatgttttgaaaatctgcataatatatcaaatgtgctgtgatttatttatctacctgtttagtgttgaacagtaaattttattccattttttggtgttataaatagaaacgtggatctctcttggcacttgtccttatgtccaatttcatcccaaattcatgcaaaattaatcaaattgcaagctcttgatgcatagactcacaagcaaaagtctacttattgagatactgtgttgataacatgatataactttcatgttgcttctctctaacttatgaacttgttgtcctttcatcagtgaaaatgaaaatgaagaactatcacttaagaaagttctactacagatacaccagggctttgatatcagacttgacctgaagggctcctctagttatgagctgagggatgagaagcggacatgcaggaagatccccttggcatggcaacctttgcaaagcactgcctgatagtctccctcctgctgtgcccagtgtcaagagaatgagcttataatattttgtaaaatatgtagattgagaaatcggaatctcatttatcccagaaaacagatttcctagtatcaatatagcttaactttttcttgaaatgaaggtcattttacgaacataaatttttctccaaaatgaattcaaacagaattttaaaagtatggagctggcataaatattttgtgaactgaatataaacactttgacttcatttctcatatgtatttcacatgcatgaaatcaagagagaaagaaattccattggcattcagccaaggaaattgattttttttttaccactgtgccactatattatggtttattatctccagaatattactctaaatagtgctacccaacagaattttcagcagtgatggagatattctgtatctgcactgtccaatatggtagcctctagccacacatgattgttgaacacttaaaatatggctaatgcaactaactaaggaactacattttaattgtatttaattttagttaattttaattttggttttaatatttgcatttggttagtgggacagcccagccatcgggtaggtcattccatttctgcatttcttttatcctctctccacattctgcttgaaagctgagaaagctgccttgtacctccagttctatgatttcactctggatactgctagaaaagtagccctttacctatgacagaatggtggtttccagaatgtactaatccccaaacctatgaatatgtcacctgacatgacagcagagactttgcagatgtgactaaattaaggatcttgaggtttagagattatcttggaaatgtgggtgagctcaatatgatcacttttcagagggaggcagtaaggttagaaatgaagaggagatgaaaagactaccaggaccaaaacaggatagagaggaaagaagatgctacgttgctggcttgaatatagaggaaatgggccatgagccaaggaatgcagactgcctttcgaggttggaaaggcaaggaaacagtttctctccaacaagaacttccacatttgaaacttctggcctccagaattttaagacaataaaattgtgttgtggtaagccactaagtttgtggaaatttgttacagaaacagtcggaaactagcattctgtcctggaaaatcacttgttcccaggacactgatctgtgatgaaataggtaggtctgaaacaggaaaccaaacaccgcatgttctcattcataagtgggagttgaacgatgagaacacatggacacagggaggggaacatcacacaccagggcctgtcaggggatggtgggctaggggcggaatagcattaggagaaatacctaatgtagatgacaggttgatgggtgtagcaaaccaccatggcatgtgtatacctatgtaacaaacctgcactttctgcacgtgtatcccagaacttaaaaaaaaagaaagaagaggaaaaataggtctgcggtgctgctccacagagagcggccaggaccccatttcatctgccaaaagaaaatgtatacgcagactcgtattgctggagtccattatgccttttaagaactatgcctcttaaacagtacggtgcttgtgggtaaatcatccctgccatttttcctattcaaacatgttctggtatctactaacacaactgtattaggtgtgtaaaaggcatctcttccctgagtctaagcagaagtgctacctcgcccccctacctcccatcaaatctgtggctgcataaattgactttataaagaaatcctgctttgcttaaacagctttggaaagctgtttaatatatttggccgtaattggttttgttttaccatctggtttagacttccccctcagccaactttaattttgaagttaatcatttttaaattgggctttgaatgcacctaggtcagatttgccacatcagaggagagtttatgtttgcattattctcaaaaagattcttcagttttgctttgttttttgcagtttatttccctatgtgagtttcatttaaaggaaattggtgcctatactaatagctgagtattcacatgtgtggaagactttccttggcattaaccattagataccatctgatgcagctgtcagtgacattggatgtgcatggggctgtggaattgaatgttgaccatagtattctgcatctagttagggaagtcaagcagtaattttgatctttctacttagtcaattgtttggccgaatacattgacttatttgggagagtagaactttttttggtggagaagaagttgtgtcgtgatggtatattttgagttaacctcaatcatgacaaaccagaatgatttcctagatgcacagagaaggaaaatgttaaagactctcaattgctttttaatatataatatgcaatatggaaatctgtcacgacacttgaaaagaaaacatttataagtgaggcctgcttcacagtaatgacaaaaacaatagacactaacataaataaataaatacataacaaaatatttgccaataaactcaagtttagatttcagtaattaggtttggaaatgcatctttgctactgagacacaaacccctaaaaacaaacagttcattggttgtatgaaatgctgagaaaaaaaatggtttcaaaaaatgctaatgctgtaataatttgaagagaataaaagtaggatcaagatcctctaaccaggatcaaattattgcctatccatttttctgaagggcaatcagacgatttttatgtaagataataaatctgtagaagtgaactgtttgtaattaaacatggcacatcatttcatgaccatttataaagtcaagtgcttgttaacaaaaccgattttcattgttattactttctttaaaattattttcatgtgagatgaattcttttcttgaaagtagtccagctttgggggcattctgaaatttaattatcctgggcttgaaaaaaagctacgttttgacttaccatgttttttgtttgtttgtttctagtgaactgaagaataattgaataatgagtttatagtaacaattttataatatgcatatctatcatagaacaggaactacagtagaatcattggtgcagtcttgatttcttaacttaaaactaaaattagggattgagtgcctcattcgaaaatagcagcatttaagtgaatgtagagttaacttataagaatgtgaacaatacaatatctttccaatatttaatgttatcatttgtcatatataaaaataattaaaacatctctttcctctcccagttttactttcaaagtttcagcaatagtcgattccctgcatacacaatttaccatgctgctaaaagcctttatacctaattttgcccacactgctctcgtgacccagagttccttttcatattcttaaccctcatccaccctgcaaactcagctcaagcaccacatctaaagagattccagaaggacaagcctccccatcaccaccatagatagcatcatatatatagcaaccctgtatgccccacagtatcctgcccatgcgtctacgaaaacacttcctgcattgcacggaatttgccaaatttgcttagagtccccagtgcttcatacagtgcatgaaacataataggcagccaataaatacccttttcatttataaacaagaatgtaaagtactgcttacttctcactagtggtttcttcaatagaccttaaagataccttctctagaaagcatttcattttccagcccctattaacgttagccaatttacttatacagtcaatttcatgttttgatttgaatgtatgttctcaaatggagccctaaagatatcagtacatttaattccatataaaaacaaataaaacagtgtttagcaattgacgttgggacataaacagatgaaaaaggcagttgtcatataccatagtaaccagaacttccataaacgagttaagacctttaaacgagaatacatttgaaatgatttatttctataaagtcttgcttagttgagtattcacataaatagtgacaatattgtgtaatcaatgggattttttgtttgtttgtttgttggtttttttgagatggagtcttgctctgtcacccaggctggagtgcagtggcgcaatcttggctcactgcaagctccgcctcccgggttcacgtgggatactatattctaacaagtgtatcgagaagtaacagttatgaacacacttgttttgaatgtgctgtaaataacaaaatggtaaaactgttttatttgaattaacacattattaaatgggttatgttccatctttactaaaacaaagcatgagattatgatgaaagagtaagcgtgtaagtcaccagttctatctcccactacttgttgacatttatgagatgagatttgtgccctgggtcctctatcattttttaacagaaaaagaaacaagtgtgaagaaggctagaaggcaaggattaaggatattaatcttagaattgtatggcaatagcaagctgtgagacctttggaaagctgtttaatatatttggccataattaagtgcatctctgaaggaactattaaaaacagatgctttaaaaaaatgttacaaccttgaacttttttgattctttttgggcttgaacatctaaaatagatgaggagaagttccttaaactgttttcttcaactcagtcattaaaacacatttattgagcttctactatatctcacgtgcagacccaggtcttatagcaataaccctcccccagaaatttagaatctaattggagagagagtaaaatagagataaaacaaaaccctgtgtcatgtacctattaatccaatatctcttggccttctgaaggatcagaaaacttaactccctgccttctttcaaacatgttcaaatcctccaactccagtaacatagatctcttttcttcactttttggcaaaatcaacagcctttttgcaaaccgtatctgtcacaaatggcctctcacagagagatttctagctagctcaatttacaacaaacattgccttccaaacggaatagcaggttttccaggaaattaggtaaaatagcaaggaccataacaaaacagtagtaattgtttaaatagtttaccacaatatttattttggatcagctacaaaagtaatgtcagaaacttcatttcagtttcttcagtctacaaatactaaaaatctgcataaacacagtatacctatttggccccactactaaaaaaaaaaaaaaaaaaaaaagagctagagccagacattagagagaatgtgtctggccaaaagacatcccaattgtttaaagacaatacatatgtgtgtgcttgtttgtttattggtgaataagaattatttaagtatatattgtgtgctttccaaggatctctgattggcagctatgattctccactgtaacttatgacaattctgtggcattaaaaagtactagggcagggtgtggtggctcacacttgtaattccagcactttgagaggctgaggctggtggatcactaggtcaggagatcaagaccatccaggctaacatggtgaaaccctgtctctactaaaaatacaaaaaattagctgggcctggtgacgcatgcctgtattcccagctacacgggaggctgaggcaggagaattgcttgaacccgggaggtggaggttacagtgggccaagatcgcgccactgcactccagcctgggtgacagagtgagactccatctaaaaaaaaaaaaaaaaaaaaaaaaagtgcgtgtttgtgcccaagtcctgactgtgtcacaaatgtgctatgtgaccttgagcactcttaatatcatggaattgccacaatttttagtttcttcatctgtaaaataaaggcattaaataaggagttctgtaatttttctagctctaaattttaccactccatttcagtggtttgaattttctttgaacccaggagaagtgaacagatgtggattttacaatttaaaaatttaaagcaacagaaaagcatacacacatgcatcatgacaatttcatagcagtgtgattttaacaggctgttaccttaaggtctgaaacaaaaataaaaagatcttcaaccatattcataggagtgaatataacattagatgtctaagactgtgtaaacaatcttcatggccaagaggctcaattataatgattctctcctgatatgtatttcatttgatgtgatacatatacaccatgaaaaactatgcagccataaaaagagtaaaatcatgtcctttgcagcaacatggatgcagctggaaggtattatcctaagtgaattcatgcagaaacagaaaaatatcacgttctcatttataattggaatctaaacagtgggtatacgtggacacaaagatagaaagagtagacactggggactccaagagtgggaggaggggcagagagacaagaggacatggttgaaaaactacctacggaaaactttatttattatttgggtgatgggttcaatagaagctcaaacctcagcattacacaatatacccatgtaacaatcttcacatgcataacttgaatctaaaattttgcttaaaaaggaaaaaatgtatatttcatttgagatttcccatcatctacagctcttataaattgcagtgatgtcagtggtctttgctgaagattttatgcgcataaattgtgttctcatagggagatttgacttcatatcttggctactgacatagaaacattttttatattatgcgcataaattgtgttctcatagggagatttgacttcatatcttggctactgacatagaaacattttttatatgtctaaatggcaaattgctcaatttaagcataaatcaacaaatgtatcaccaatatttcagcagacgctaattctttttcccgtatcatttaaaaagttattagatccgctggcttgatggggtcaattccagtttttaaaatcttggtccacgtgtctatgtgtctttggacagttctaggcatccagtgccccaaagtcatgggagacttaattcagcaaatcatatgctaattgaatgtcttccctggtgcagttcttccctggttactatttttacctttcctttttaagagttggggcaaaccttatggtatcttctgaatacaagtcaatattcaatggacgttttaaataagttaattgtatctaatgtgtgtgtagctcaatgtaaacattgccatatttatatctactataggagccaagggccctctcaaagctcactgaaaaatcaacttgcaaaaagcatattggagaaaaagcatacaaatgtatttaatgcatatacatgggagcctgtagaataaaggccaaagatacagaggaaattgtccatttttaatgtctacgttcaaccaagtgtggacagccatctagaaacatgattgaaggaaaaaagggcctgatctaatgctaatagatttagtggggaaacccaacaaggcctaagttcttcttggcctctctctacagcattccttctttcagggtatggaaggaccctctctggaatggaggttttatgacctacagtcaaacaatatacaatatatcaattgtatattgataatttcttatggccagtttttacacagaatggtggagggaaaattagagtgatgtttttaggttttatggctggctttggggaaaaggggttctggtttctatgacccactttggggaagagggattctagtttttatgactaaccttgggggataataggatctagacacaggagagcaggaaaagtacagagaaaatcttttgcttctgagactgccactgaggccttcatttgggatattgttttctgatccccaacatctgagcatcctagaaaataaaaatttatgcagtggctcattcctgtaatcccagcactttgggaggccaaggtgggctgatcgcctgaggtcgggagtttgagaccagcctggccaacatggtgatacccccgtctctactaaaaatacaaaaattagctgggcatggtggcgggtgcctgtaatcccagctactggggaggctgaggcaggagaatcacttgaaccccaggaggcagaggttgcagtgagccaagatcatgccattgctctccagcctgggtgacaagagtgaaactccatctcaaaaataataataataataatttactaattacacacttctgccttgggagaatatcttttatttaagttaatgtatcttatataggcttttagaagccatttgtgtctccttatttttcagaatactgattgcagcatgtttgatactttttaagcaaaatcacactgaaaataagacatttcaactgttcttcattagtgaatatttgggagagcagaatgcaatgatgcttatctaaggggatgtttcagtttgatttcagggctgtaaaaaatggtgaagccattaaaagagacatcccacttcaaatgatatagttatatttgtaaattgtcctattttgttaaacttaaaacagttctatatttaagtaactgtaactacttgtaggcattcggaagaataaaccttaaaataatttattgctttcatggtgattttattgaaaacgtcacttcctttaaatcatttcatcaattattctcataagaaaatacaatgtcagtgaaataaacagaaaatcaaataccacatgaactcacttataagttagagctaaatgacgggtacacatggacactcagagtgaaataatagatactagagcctccaaaatgttgcggggaggaagtattgaaaggtcacctgttgcgtacaatgctcaccatttgggcgacggatacattaaaagctcagacttcaccatatatggatgtgagacatctgcacttatacccactaaatacaaataagtaaatgactgacacgatattatattatccaataacaattactcatactagtaatttctttaagaaagaacagctgtggctgggcattgtggctacacctgttacccaatactctgggaggccaaggtgggagaattgctttaggccagaagtttgacaccagcctgggaaacatagtaagaatgtgtctctaaaaaaaattttaaaaatcagccaggcatggtgatgcatgcctgtagtcctagcttctcaggaggctgaagagggaggattgcttgagcccaggtgtttgaggttacagtatgctatgatcacagcactgcactccagcctgagcaacagaactcacatctgtaatcccagaactgtgggaggccaaggcgggaggatttcttgaggccaggagttcaaggccagcctgggcaacatagagaccccatctctacaaaaaaaaaatttaaaaatataattagttgggtgtagtggcacgtgcctatagtttcagctatataagaggctgaggcaggattgcttgaccctaggagtgtaaggcttcagtgagctatgattgaaccactacagtccagtctgagaaagaccctgtctcaaaaaaaagaaaacaaaatagaatacttacaaatttatggtgttttcattcttgtatagctttggtattcttgtatacttttgatattacttgtatattgattaacttgtgaaaatatatctttgcttaactattgggtttctccaagtttggtcttgcttttctaagtgttgtatctatatataaagccttcagtaattttgcaggtaacgggacttatgttaaatattgtcttttcttcatctataaatgaaatagcattctgatagatgagattatgtaaatcctttagtcagacgattagacttactgcataattatattttagacatgagatcatatagtagcctcaaattgtatgacagatttgagagaaaagggataaataatctaaaactcacttgaaagtcagcagcctgagacattctctgtttctgtgtacaaatatgttagaaaaatggttctgaaacactttgacattcctcactacttaaagattatgtaagaaagtagcaggatggaaactgccttattattttcttttttcttcttcttcttcttcttttttttttttccccccagacagagtgtcactctttcacccaggctggaatgcagtgacacaatctgagctcactgcaacctccgcctcctgggttcaagccattcgcaagcctcagcttcccaagtgcgccatcacgccaggctgatttttgtatttttagtagagatggggtttcaccatgttggacagattggtcttgaactcccaggctcaagtgatccacccacctcagcctcccaaagtgctggggttacaggcatgagctgccgtgacagccaaaaactgccctattttcacagtgaatacacaaaagagctataaaattaaaacatgaagctcctttgcagtaatcattaatggagcacaaaaccctcaagccagcctatgaaatgccagttcaattccgtgtccgttctgtaattcaggaaaaactctacaaaagtatcttacaaaggaagtattctgctttactaaatctttcctttaatgaaatactgatctgaaaacccctaattgaagtaggatgaaattcattcaaaaaatatcaagcatgtgccaggcactgtatgccagtgaacaaagatgcatgccttcactgcattttagcagagggagtaaaacaaagaaacggcagggcagagcaccaggatgtcaggctgcaattttttttttttttttttttttttttctgtgagacaaagtctcgctctgccgcccaggctggagtgcagtggcgcgatctcggctcactgcaagctccgcctcccgggttcaagcgattctcctgcctcagcctcccgagtagctgggactacaggcgcccgccaccacgcctggctaattttttgtgtttttagtggagacggggtttcatcgtgttagccaggatgatctcgatctcctgacctcgtgatccgccctcctcggcctcccaaagtgctgggattacaggcgtgagccactgagcccggcccaggctgcaattttaaacagagcgattagagcaggcctcattgggatggcatttgtgcacaaagtcaaaagtgatgaaaaaattatccatgaagttttgtgggagaaaagcattctaggcagacactagcagtcacaaagatcccatggccagctacactggaagaatagcaaagatggccgttgtggacaaggcagagtgagcaggaggaattcaataggaattgaatgaggtggggtggagtgcatgtaatttagggctccatagaccattgtaagctttcttttactcaggtaggaagccatctaaacaagacttagacttttaaaggatcagcctggttgctatgagagtagaataggttgggtgagaagagacacagatgaggcaaaataaacaccagccgggaaaccacagaaataatccaagcatgctatgatagtgtcttggatgagaataatagcagtagagatggtagctatggtagtgtcttggattagggtaatagcagtagagatggtagctatgatcgtgtcttggattagggtaatagcagtagagatggtagctatgatagtgtcttggatgagagtaatagcagtagagatggtagctacaatagcgtcttggattatggtaatagcagtagagatggtagctatgatagcgtcttggattagggtaatagcagtagagatggtagctatgatagtgtcttggattagggtaacagcagtagagatggtagctatgatagtgtcttggattggggtaatagcagtagagatggtaagattttaggtaagattagatgaaggatgtgaggagtccaagatcatttctgcctgaaaagccagaagaatggagtggccattaagtgattgaggacgactgagaagaaaaatttcagaggcaaaaatatgctttatttatttattttgaggtgtctagtagatacctaactgcagatgaggtggggtggagggcaggtaatttagaggttaatataatctgatgtccttataatgagatgagatcaccaagatgagtactaagagaggaggcaagcagcccaaggtcgagctcgggggcacaccgatgttttatcaaaattcagggaaatgaagattgagccggcagcaaaagacagactgagaaggagcagccagtaaaggagaaatgtcaagcaagtgtagaaatttgcaagccaactgaagagtgcttcaaggttaaatgctggctgctgattagatttaacaatgtggaaatctttggtgagttttactaggagtagaggagtggagacaaagcctaatcacctgtcagatgacctaaccaagtgtccaaacttaacagcctgaaaaagccataactgtatgatgcaatatggagaccatagcatcaccttgcactcttgcatacaaagtttaacctgaaacttaaaaaatttagacctttcagtttacaggaagttcaaagggatattagaagttaaattaatgacactacaaaggaaaactctacaagacaacaggcctagtatttccagaaagtgagaatcttaaatgaatcctgtttgggggatgagggtagctatttacaaaagagacacatggaaaaatctgaaataagaacttgatgttaaattagggaagtattttaagtggggcagtggtattgagaatattatatagaatcatgttcttagcagatgtatgtttaagtattgtcgtgtctacgactttccttgaaatatttcatgtaaagcaaatatgccaaaatattttaaaaaaagaaaagtggttctgacagccatttccaactattcaaactaattgatattcacttactcagaacttcttcaaccattacttcttgagaacctactcaatgccagacagtattctaggcaagggataaagtgtgttgaggaaacagacatgttccctactctcatggaaattacaggtcagtgaataagactgacaatgaacccgagaggtatagaactaaaaagtttgataaattaaagagaacaacaaatggtaatgtagatgaaggtggtgactacctcagattgggaagacagaggagaaacgtttgggaaattgcatttaagggaagaaccaaaaaatacagatctttttgtaaagattgaggaaaagagtgtatttgaaaaaaagaagcatgtgtgcaaaggcagcctcacacttttctgctcagtgttcagttgacacctgcccttgttttgcttcttcgtgggttatgctatagaagaggagcatgaggcagcagtggagaagcaggtagcagatcatgcaaaaacatacaagagctcatttcttcctaaatgaaaggagaatccattgaagtttttctttttttccttttttttttttttttttttttttttgagactgagtctcactcagttgcccaggctggagtgcagtggcatgatctcggctcactgcaacctttgcctcccaggttcatgcgattctcctgcgtaagcctcctgtgtagctgggattacaggcatgccccaccacgcctggctaatttttgtatttttagtagagatggggtttcacaacattggccaggctggtctcaaactcctgacttcaagtgattcaccgacctccacctcccaaagttctgggattacaggcgtgagccaccacactcagcccaacaacgatttttaaagtagcgtgacatgtgaaagatcagtctgccattttattgagaatgaattaaagcaaggcaagatttggaaggggcagtctagtcaagaagctgcaaaatggggtgggtggggttaggaggttgaactggagtggcagagacacagaaaagtggacagattggagccagtttccaaacttctgtttacaaagctttgttaatgattgatgcagaagtgaaaggaatgtgaagaatgacttctggtttcatggtgccatgaactgtgatgagggtgagcagaggagtagcaaaattagagaataacatccaaagatatgtttgatcatattcacccagcaatgcctctgatacctctaagtgattatatcaagaagcaggtggagtgtccaagtttcaggctctcaaagtctcaactagagatacaagtttagagccttcttagagaaagctaagggctgagccctaaggatgccagaactcagagttgaggcagttaaggaggggccaggaagaaacagggatcaactcagggcaataatgtgagttcaaatacgttcatagactgagaaaacggaggttgtgaatgcctgtgagaaaaggagcttttgtggacagatgagagtggatttcaggttggagttgactgaagtgttaagagcttgcttcagtgaatctttcaaggagtttgtctatgaaagggattagggaaattaggaactggagagggttatggggccgaaagggagagttttgtcatttgttttaggtaacattaatgaccacatattgagagaagtaatgcagaagaaaagttgataattctggaaaagtgtaagttgaatgggttgacaaagccagaggagataggacacagagctcatgcccacagagacgctcctttcaaatagcggcagcaccgggagagtttcctctgttctggttgtgtaattgtgtcgagggtccaattaccttcctgaatttttttttaatgtaagtaatttgttttaattgacaagataatgaatacctttggtttaatttatttttaataatacgaaagggaatatggtcaaatataagttttccctgcacctcaggtcctctccaaggaaaccactgtaacagcatccagtgtcttcctttcagaaatattctattcacagataagaatatttatgcctatgtagatagatagatatggatataggtgattctacatttctgtggtatcagtcacattctgaagaggacagaactgatccacttaaattcgggtgcggtggttcacacctgtaatcccagcactttgggaggccaaggcgggcagatcacctgaggtcaggagtttgagaccagcctgacaaacatggagaaaccctgtctctactaaaaattcaaaatcagccgggcgtggtggcacatgcctgtaatcccagctactagggaggctgaggcaggagaattacttgaaccttggaggcggaggttgtggtgagccgagatcgcaccactgcactgcagcctgggagacaagtacgaaactccgtctctaaaaaaaaataaataaaaataaaaaataaaaaataaagttttgtttttacaaatggttgaattacaagggataaagggacctacacagataatgcaggaatccagggctggcagctatagagctcacaccaccctgggcccaaggatatgatggggttgcagagattagagagctcagatgtgtttgagaactgaaatgagccacagttttttaaaaagtgtgacattcttggccgggcacggtggctcacgcctgtaatcccaacactttgggaggccaaggtgggcagatcacctgaggtcaaggagttcaagaccagcctggccaacatggtgaaaccccgtctctacttaaaatataaaaattagttgggcatctgtaatcccagctactcaggaggctgaggcaggagaactgcttgaacccaggaggtggaggttgcagtgagctgagatcgcaccattgcactccagcctggggaacaagagtgagattttgtctgaaaaaaaaaacaagaaaaacaagtgacattcttgtgacaaccaaaaacactgaaaataaaaacaaatcattataatatagtgtagcacagagcagacaagagaagtgactttcttactgaaggctgactgaggcagtctcacaagaaagaaccaggaaaatgcataacctgacctaaatcttctccccactctaatctgctgatagggtaagctcaatcaaggagaagtttaggatctctcagtgtactctgccttatggagctgagggcagggaggggaaagctgaagagtgattcttggaggggaaaatggagatttctgaccttcatgcatcaccacaatcaattcactattcacacaacagctagaacaatcgtcatttaaaacaaatggaagcatattataaacgctgttctgtccctcttgctttcttcccctggcaatatatttttgagattgtgtcttatcagtacacatagatctgcgttgtctttttaatggctgtcaggggttacattgtacagactcccttaatttattactaagtttctaaccaataaatatttttccctagattttttggctgacacaaacaatgatgcaataaacatttttaaatatgatttggggaaagtacactagtgcgtgtataagataaattcttagacatgaaatgactaggtctcaatatatgcacatttgaaattaatagactttatcaaattgttctccagtgtgcactctgatcaaaagtgcatgagaaggcttttcccattaaatatcagagagatgttcaatgaatctcattgaaatttaatttgggctgctttgattatgaatgatgttgaacattttctatatgtttaaaagttatgtgtttttttttctgtgaactgccctgttcaaaccctttactcatatttcaattatattgtttcttattagttcctgagtattcttcataggataaagaaaatggtcctttgtctaccatattaaaatatgcttaccaatttgtctttgtatttggctatgtttggtcactcaagatttaaaaaaaaaatatgtagtcaaatttattaatggttcctggatttgtgtcttcattagaaaggccctctatattagttgtttataaaaagtattccaccataccttattatgttttattgccacatacgtttaaatctttcatctatctggaatttattttggcaaaggaagaaggaggtctcactctttttctcacatgatagctgattgtcttacatcatttactaagtaaagcactttctccactgacttaacactgttaacctaatttgtataagtctttgtatttatttctggatttttaattctattctattgatctatctatattttaatacaccaatattagtttatatttactgtgggtctagtaaatattttatctactatcgataatcttacctgttaagctttaatttcagaatataatatccccgcctctgtttatttttattttttatttttatttatttatttatttattttgagacggagtctcgctctgtcacccaggctggagtgcagtggcacgatctcggctcactgcaatctcctcctcctgggttcacaccattctcctgcctcagcctcccgagtagctgggactacaggcgcccgccaccatgcccagctacttttttgtatttttagtagagatggggtttcaccgtgttaaccaggatggtctcaatctgctgacctcatgatccgcccacctcagcctcccaaagtgctgggattacaggtgtgagccaccgcgcccacctctgtttattttttatatcaattttagatttcatcatgactttttaagtttcccgttagtagtgtttgtggttatattctcccaacatctaggtaccttggatgtctttctcgcttcctctctctatctctcatcttccttctacctacatctcactatatactctctctcctagttcatggctacccataaacttttcctagtctgcccctgcagtgtgtaatcaaagatacaccaggttggtcaggcgcggtggctcacgcctgtaatcccagcactttgggaggccaaggctggtggatcacttgaagtcaggagttcgagaccagcctggccaacatggcaaaaatctgttttctactaaaaatacaaaaattagccaggtgtggtggcaggcacctgtaatcccagctactcaggaggctgagacaggagaatcacttgaacctaggaggcggaggttgcggtgagctgagatcatcccactgctctccggcctgggtgacagagcgagactctgtcatttaaaaaaaaaaaaaaaaaaaagatacagcaggttgtggtgaaataaaatgtatctatggacgtgaagcagataactcaaacttgatacttaaaacaagtatgttacatattcctgtgcatttcagaaaatttactttggggcacaatatttcttgtatctttttgttatcgtcatcttttttcctccagtaaaagagatgagatggaaataaggctaaatatttttttggggagaaatatagtttacaattattctaaatttaacccattttgagaaaacaaattatgaatttaaatttaaaatttacttttttaagagtttctatcaaaacctatcaggtttgaaacttccttgttatataagaaaaagtataacctcaaactgaaaatgccactgattatcactggtttctacacacagaatatctgaggcatcttaattaatttacctccaagtaatcaattaataatgtaacccctttaatccttttgggtttcttgtggtctcattctactccaggtttttaagattttctacttggagcattaaaatagctgttgagtttattttgcctttagtttttccctttcctgtctatcctgcacctattactaccttaatattttaaatatgtagttatcaagtaagttcatttttgaagactttcagtgctttccatgcctagtaaaaaatgttctaaatgccaaagctagttaaaaccattcaattaggggtgaagagaatatatctccgtggtgcatctcttgatggctggctttattttgcctctggataaagttcaaaaatcccttgaacagtgaatggactgtatatcatcacacaatctcccagaaatattgtttcctgctatttaacttcttgataagaaaccataatcaaatggcagagtttacaccgtaggtactcaataaatataagtcgaatgaacaaacaaagctacattctccaagaaaatccctaatgtaataattaatacattttgcaatctgaacccaacctatggttgtacatttaacatctatcagttcagttttttcagctgcatataacgcaacacataaatgacttaaataatagcagccaccaaatgtattatgtcataataagaaggcaagatataggtccacatcaaagtagaggaactgcagtcctattttagttaggatatgtatatttgttgtttttttctttttctttctttctttttttttgggtggtgggggagggagtttcgctctgttgcccaggctggggttcaatgacatgatctcggctcactgcaacctctgcctcccgggttcaagtgattctcctgcctcaccctcccaagtagctgggactacaggcacccaccaccacagccagctaatttttgtatttttattagagacgaggtttcaccatgttggtcaggctggtcttgaactcctgacctcaggtgatccatctgcctcggcctcccaaagtgctgtgattacaggtgtgagccacagtgcctggcctatttgttgttataataaagacccaaaataacagtggcttaaaacatccagaattatatttctctgtcatgaaaacctttgggtaggtggcccggggctagtatgctacccaaagctcagattacttagatattttcctttcattcactgaatgaaagttctcactatcacaggttcatttctggaagaagattgggaaggacaaaaaaggagaaatagttcatatccttcccctttaggagcttcatccagacattgcacatggcacttccattgccttcaacttagccacagggccatgtaacttaaagaaagcctggaaaatattgtctgtaactggtggggttctatgtcaagacataaattctattgctatagaagaggactgtaaattttgcataacaatgtgcaacagcttaatgactttgttaggatgcctgactctttccttcttgatccttggagactgaaatagtatccccttctaaaaggcacaggccacgtgaaggaggctagatacttgagcaagagcagggtgacgacaggaagaaaggggaaagggctgtggcatgggcatccacaactgtctgctgtgatcctcattcctgtgtgcagactttcttctctagctaaactcactgatttattacttcacaaccacattctgtgcttaactaaacatgcaggcccttgtcttccctccacgtagaaggggattcctcctccttccaggctactcaagtctaaactttctttcaaagatttgttattccataaaacttccatacacgcataaaacaatggcctatgatcttcattctgtaccagtttttctaatatctggcatatgtatatagaactcatttgctaattatgtttgcatgaataaagacaatttctttagaatgaaactttctttattctttgtttctcagagtttgttttagagtgtcttatgtggaacaggcgactgactgatttgaaagaacttagggttgtttatttaggtttaatacagttcaacctggagacagatgaatagacagatggttttgcaggttcttttcctgtgggccagcaatctttcaaaagacattttatttacaaaacagtgagaaatatattgtaaaagtataactctaagtaaattagcaaaatgagataaagtgaactctagttcattataataaaaaagatttaaaaggcagaaaacccaagttaagttgcttatctcatcatagcaaaattaatgattaatagatgtagaccaaatatgcttgctttttttttaatgaaaagtttgggcataatgtcagaggtacagtaaatatcttagcatttaaacatttctataaataaatgcttgttgaaggagctccatcaatattacaatagtgtttctagttttaccactataatgttatgtaataacaacattttaaattagttactggaattgtgattatttttctaaataatttctatttgaataaaataaatagaaggcaggataaaataaatagaagacactccatagagaatatcctttcaactgaaatcaaaatctagttagtatagaaataaaagtactcaaatattgttgagatcaacatagaaggtaatgcagaagaaaatactatgattatggaaacagctctgagagtcacgagtatgaaaaacagtattcaaggaagcaagaattctaaatatatttcttgtcttaataagcaaaaataaaatttcatgctgagatgaagggaacaactcataaattaaggaggcaatttatactggaataataacttataaattgttttaaataatgggccaatcatttacaaaaataagctatcagtaacctagaagcagtcttttctaaagtttagaacaaggcatatttaatgtccaggtgtaaagttggcattagtctaaaagcaaattaaatatcctagcactgttatatgtatgtggtctaagcatggggaaagtcttagctgaccctgagattgagaatgctgaacttgattttatgaagaagtgaaactgcctttatagtcagtgatcactttctatgaattatatgaagtctacagtcaggtgcagaaatgatttaacttgctaaatgagattacaaagattattatatgtcactctgagtagatcagattaaaacatggcaggaggacctatggaaaagcagtcttaggagaaatgactgaacagatcgtgttagccctggctgcaggctgtcttctctccttgtgctcccttcctgggctgtttctcctcctactcagcaactgcattctcctttgagcccccgctgcagagaagtgcgatgcgctagagccttgctattccaaccgtggttctctgcccgaccacatgagcatcacctgggaccttgttaggatctcagaatcccagactccaatcctgaccgcaagaatcagaatctttaagattttcaagagattcctatgcacacaaaggtttgagaaacactacttttgagtgccaaggattcggtttatacagaacagcagttattctgatacacacggcactgttcattgcgcttggtaccaccagaacatatttccatgtggatttctggagtcatggtgctatgactatggttttcatttcaggttttacaagaccaaatatggttttaaaggtaacacaaagacattttattttaaaatgtctattttaactttaagcactgtagataaaaagccttcaacgtgcgttgatgattaccaaggcatacagttatgctgtcaggctaacattttttagatttgaaataaaagttcttccactatccctgcttaattaaacaatgtccataaactaccaagtaagctactacaaacaaacaaatctggtaccatttgcagcttcttctatttgtgattcccaaaattcccaatgctttgcaattaaaatcaagttcagaaataaaagagatgctatgggtaaaataaaagtgcaactgtcatccacagccctggattgaattgcaacatccatctaaccagccactctgtccatgttgatttattttgctttaagtaattgcagcccatttgaccttccaaaatatagctttcatttgtcttatgtattggagtctaaatgaattttatttgaataaaatgcatttgattctaaagcattttgaaagctggaactaagtatgagttcgatggagaaggcagggctgtctggagcccgagttaattggatgcatcacttcttctggagtcacttgatcacaacaaattgacacctgccaacttctcccctgtaccttcctgatcccggtcaagtcattctcaagtagaagcagtcgagtcatttttattcatttttgatgtgaaccaaactttcaagctaggacttgccatgaaacaaattacacattccttgtggctactaaaaaaattagtttattagcgcaagagtctggatttgagaataaaatcatagatacaaataatctatatttctcacagtaaaagagatatttcttctgaaattacttgtttcttggtggtgtaacattctagcattgcattcatccattctttcagtcaatgtgtcaataggcagttactgagcatgcacctagttatgtaaagaattataagataaaaacccctaattgtaggaatctcagttcagaagagacaggtgctcaacaaaccattgctaagcaatgtaataatggtgtattggacataggttactagttctgtggaaatacagaagaaataataggaaaggggtagctaggttaattagtattttgttttgcttggtaactggtcctaacttttaaaatatatatatatggcgatagggtttgcaattatatttgaacaagttggttaggaaataaaacattttccaccattaagaattagaatacctataatcatcacagggagaatgtcaattttcaaaataagaatcaggcccgtgtggtggctcacgcctgtaatcccagcactttgggagtccgaggcaggtggatcacgaggtcaggagatcgagaccatgctggctaacacagtgaaaccccgtccctacaaaaaatacaaaaaaatattagccgggcgtggtggcgggtgcctgtggtcccagctgctcgggaggctgaggcaggagaatggcgtgaacccaggaggcagagcttgcagtgagccgagatcgcgccactgcactccagcctgggcgactgagcgagattccgtctcaataaataaataaataaataaataaataaataaataaataatcggccgggggctgtggctcatgcctgtaatcccagcactctgggaggctgaggtgggtgaatcacttgaggtccggagttcggcaccagcctgaccaacatggtgaaaccctgtctctaataaaaatacacaaattagctggatgtcgtggtacacacctgtaatcccagctacttgggtggctgaggcaggggaatcatttgaacccaggaggcggaggttgcagtgagccgagatggtgccactgcactccagcctgggtgactctgtctcaaaaataaatcagtaaataaattaataaataataaaaataagaattataagaaagaaaaatattaaaattgtatctaaataaaaaatacttttaaagaaatccttaatactgaatttttgaagtacagttggacctctgtatttgtgaatccatcagtggatccaaccaatggcaaatagaaaaaaattaaaaataatacgatgataaatctaagtaatctagagatgatttaaattatgtgggaggctgtgcataggttatatgcaaatactacaccattttataacagggacttgaaaatgcgtggatttgggtatctatggggtgggtggggattggtgtggaacaatcccctcacagatagagagggatgacttgtattcattaatctcacttgatggatatatcctttttgcatgcgtgtaagaacacagtaatcttttctatcatcgagatgattttctactctgcccattatttacaccacatttagattccagcctggttttcctctgctacttagtacccttctgcactacttcccccgaattaattgatataatgagctgatgtaaattactttcaatattaggctgagctaatattaacccgcaataatttagaaagtaaatataccatacaacaccatatacgtactgaattccaaaattaagtatcaaggatgttttagtttcatgtaattttgaagtgtctagcccattgcttccttccatcatatgcagaaccacctgctctggatgtaaacaccttctgctgtgtgtgttcccacgcctcagggcctgtacagaatagtggctataggaaaggaccctcacaaccctgcacctcccactgctttcactcttccacctccttatcagtgcttttctcgcctattctgctaggaatgattttcaacattttaatcataaacatacaactcttcttttcaggcccgggtgaaatgttctgaactttatgaagcctttgtttatcatccacttgtaactcctctagtatccaaatttctatagcatttcgtgtatcttttatgactcatcaaattcttctgggtttgcatttttcatgaatcagatccccaccccacctccactcaaatttggagatgaaacatctttgtagccttgataacactgagcccaaattttataaaaaagtaagtgtctattaaatttagggtgaattttccatccctcatgataattcaacaagatgcttttgtttatattgtatttttccccaatgttcttcctctcattttcttctcttgtagtcctgtccattcattgagtctcaacctaaaagcttttaattgtgcccaaaatgtacatgattcctcatgtgaaatcccgtagtactttatttgtccctgaattatgctgtttttcatttcttccttgcactgtagttttcatacatactgtatctacttctatatgaactatgagctcttctgcaaggctgtgaatacagtcgtagtcatcttctattttccgtagtgctgtgcatatagcaggtgctcaatcaatgtttgtttcaggagtaaaagtttgtaaaaagttgtggaagaacagcaagctactcagagccaggggctccatgccaaactgagccaagcccagctacaggtggttttaggcatggctagtggtaaattgagaacaggagttggagaatgctatttctgaggccagctctatcagattttgtagcagggagctgctagggcattatgataaaggggtggctctttatctgtcctttgccagtgacccatgattatagattctgctattttaatctgggaaagttttcctgtttttgagagttccctactaaagtctagatgtcctttgtgaatactggtacatcacaatgaatacctttgttatctgtgagcatcttcagcaggattataacaaaaatcaggttgtggggtagatggagacaggaattgatgggagggatgagtggatggaaccaggagaaagggtttgtgccattgaaacaggggtgtttcaggacaaatttcagcctcacaatttctgaggtacagtaaagctgtgccctggaggctgtgtttcagaaatctaaagcttccgtttattggcccactatttcctgcctattagttgtctgttaatacttcatgaacattatcctcaaaccttaaaattatttgtaagatagaattatcctatttttcaaaggtgaaaactaaggttcagaaaggttcagttaagtagctacaattagtcatcttaataaaaagatatagatttgaacacaaaacctgtatctttccttctgtattatgcttgctgcctctttcagcaggctgctttagttatccagtgggaaataggtgtttgggagacttagaaatcttttctttctaagttagtatattttcattgctgttatcatgacgttatttcaaaaactcaaattgctatgaaaaacttgatgatacccctctttacgtcagtttttggcttgacaaagaatagaataaaacaagaaataagacagcttatcttcgatctttcaccaggagggaacttagctgctgtctttgttttggggtaaaagaaaaataaaatgaatctgtgatattcaagtaaatccctcagttgtttgttagtgtctactgtttactcaaaaatgggaagctccaggtcggtgatacatcatctttgttgcgcttggcaccttctttcatgaatcatattaatctgcttaaactaacaaggattaattgccttggtaaggcaacctggcattgaaatgatatattgcccagacagcttggaatttggccactcataaatctcatttgtttgttggtttatttctgtttgtctctctctctgacagatgtgtgcccaatcactgtgagcatggtggaaagtgctcgcaaacatgggacagcttcaaatgcacttgtgatgagacaggatacagtggggccacctgccacaactgtgagtgccaatttatctcactttaatcttgtaattgcatgagaatctcaagtcttgagctgtgctttgaagctcagcaacctgaataatccacataatacatcactcgaatctgaaaaaccaagattccaattgtcatttctccaaaaaaaaaaaaataaaatacactattctacttgttaaaatatgttctctggtggcaaaggactcaaaaagaaggaccagcatttcctctgttccataaacacatagttgagattggaagtccaaacttggattcgcctctctgtgtctaacccacatctgttgggtcgattgtttgggaaatcgtgttagtgtgatgtctctgactggaccctcatttattaattaatccgagagggagacacagggtaattggaacatttagtttctggatgatggctgcctcatgctttagcccaactatttgactacctttttttagatcaaagaaatgagtccgaaatggaatatctaaaagccaatagataaaatacataagaaggtaataaaatgaagacataagagggtaaaaatattttaaaatggcaaaaataaaaagtaacatgcaaaaatgactaggaaaacacatatgtgccttggtttatataaatagctttattccaaaaggttaaataaaaaataaatttctgtacttaaaaaatttaatgctaactcttataattataatattaattttccaataatgcatcgccatttgcagaacgcttttgaaaacaaagcacttttgaaaacatatttggcatgaatcacataattacaagaagagagtcaactgttggttagtgtgtgcatacgtatgtgcctgtgtgtgtgtgtgtgtgtgtgtgtgtagggaaggaagagcaagagaaaaagagagattcaaccttctctcaatatgcccaaacactgaaactctaatatctaaatcctccgattatacaaacagatttcactttacttttaggaaatggtgacaagcaaactatctcagagtagagccctgtgtacagtaaaaatgtcatacagctctctaagcctttccattgtgttatttgtagtaatgtgcaagaagaaatcgtgttttgaatatattgtaaaatgttgacttacaaagttgcacacatttatttgtttaggtagatattcaaaaacaagaggcaaaggaaatcttgacaaaactaacaatagaaagatgtcaagaaggtcaaaattgatactagattcattatctgtgtttacatatatgaaagtattttaatgaataaagaacaaaaatgattgatactgaaattaattcaaagagttataactaaaattgttccttaccaatcacatcaaaatattaacctccagtatgtgacatttattaaatataacgtgatgctagaattacattgatgaaactcagtgccttcactccactagcataatttttatcgtgtgttataaataccatatttaattacacgggatcttgttcctgaaatacgataatgctaaccaatggtcaagagcaagaaatcggtggtggttgcaaggattttctatctcagtgatggcttttacattgaactgaaaagcaacttattctttttttataactgtttccatccttaaaatacacagcaaaaaggcaaaaaaaaaaattaaaatgtatgctactggttgagtagctgaggtttgttttgttttttaagggtaatgactccaaggattagaaatgtcctaagtgtgtttaggtttggtgctagtggccagctccaaaggtaaaagacaaaaattgtcttttgttctgctgctccttcctacttgttccttgctccattttgttggatctttaaaagcagaatcattctttttaataataaaagcctgatcttttgttgtcttctccaaatgaagccaaaattttgaatatccaacgtgtgcataaatagaggtgaaaagaccatactacataattcaagagagggttggctggtgactttttctttcgaaaaatatacattgtagcttattgaaggccatttgcctcctaataacctgaaagacttgatacagtcttacttatccaaatggattagttaaaaatttcacacagcacaaatgtaagaagatacaatgtatgccattcagtttgacacagaatgaacaattttacatttttgcgaaatcaatgaccacattcaaagcaagaagaacgaagtgcgaaggccccagtttctgatgtgtctgacgctagctataaaaccatcaggccgtgtgcctttgtggtcaatcatttgacttttcttgcactttgttcgactgaagtctcttggtattctacaagccagtgagctgagatttgcagttgcttattctgtattctgtgggtttgaactgtgtaagtaacataaaatattttgcttcattatttcctgcagaagaccaagcattcatcttgaaaagaaatcatgctaattattttaaatagtatttttttttaaaaaaagcagctaactaagagctaaagtttaatataatagaacatttgttagagtttcaaacattacaggctacaatattttagcacaccttctacactagcccgggcttggtcaggatgagacagcagtgctatgagtgacctgtgatcatccaggctagaagctctagttcaagatggaacagagaggcctttttgcttggtcactctgccttgtgttgactttgactttaccattttcttacttgtaccctaggccatttaaattatttgagcttcagttttctcctgtaggaatagataattaacagtgctcacctcttcaagccattgtgagattaaatgaaatgatgtacggaagatgctgagaaaaactttggcttatgtggtactcaataaatttttgtcatttcatcactttcagagcaattgtccttttcctttgaacttctataccaataattgcccaaatcacacaatgtgtctcttaatttaatgtcaccatacattgtttgctatcacttttatggcagatttggactgcagtgaatgactggtttccatagtatttttctccagaagaattgaagagtatgcctcctaaacctatgtctcctgttttcatttgttagtttgtgtgtacatggggactttgtttttacgtaaattatatgtagggcttagaggactgtcatttgtgaactgctcccctgaggagccaggatgtctccctttgggatgagtagacaactcaatcccacagacaaagccaaagatcacagaagatagtcagatcacaggaaagggaaagccagtttttgtcgtttaagaacaaaagaggcaagtttgttacaaaatgcaaatacattaaattgttgaagttttaaacttgaaaaaattttctcatacaggcattccactctccataaatcctttaagatctgaatagtagcatatctgaacaccaaaccatgacaaagggactaaaatgatcatgttgaacagtttgtgtttattgtattgacttatccctgcttcagtctcccaaaagcactgtaagaatgtatcttttgcttggagatggagtcttgctctgtcacccaggcttgagtgcagtggcatgatctcggttcactgcaacctccacctcccaggttcaagcgattctgctgcctcagcctcccaagtagctgggactacaggcacgtgccaccatgcccagctaattttttgtattttcagtataaatggggattcactgcgttagccaggatggtctggatctcctgacctcatgatctgcccgccttggcctcccaaagtgctgggattacaggcatgagccaccatgcctggccaaacattcttatatatactactagttccttgtgtggaactgctctaaaaattccttagaatatcctcaataatatgaaaacttttggctaatttaatgaatgcaagaggttaaaggatagtattttagtgttcgacaaaaataagcaatgttagccttggaaatttattaaatgtcagatgtgcattctgacagaaaatatttttgcagatctttttattaaaggagagattttcatgttgcccaaatatatagacgtaatgtttccaggggaaacaggaggaataaactagatgacctatataattctcttttaattttaaaatcacgagatttaaaaattctgaaatactagtaaggaacaggtcctgacattgccaaataaagcaaaagtaaaattttttctagccaatgttagagaaaaatttaaatgtaaacggtaacaattgtacattccgtatgctggagcatttcctctgggttcataaatgtgtaaactgtaaattgtgttgcaccttattacagcacacgtgagaggcgcagtggatttcaacagcccataccatgttgttgataatccatttcacctataattgatataattcaaagaataattttcaaaataaattgaattctatttgctgtagtcatactaacatagagcataaagacctagatttattggcacgaagaaacttggtgtctctgtccatttggagtttctacaacttaggcatcaatgataacttggagtttgagcattgctacaaaaacaagcagcattgggtagaattgcgttggatatggtattagtctgttctcacactgctataaagtaataccagagactggataatttagaaagaaaaggggtttgactcacagttccatgtagccggggaggcctcaggaaacttaccatcatggtggaaggcgaaggggaagcaaggcccttcttgacatggtggcaggagagagaattgcaagcgaagggggaagaaccccttataaaaccatcatctcgtgagaactcacccgctgtcatgagaatagcatggaggaacttcgcccatgatccaatcacctccctcccttggcatgtgggaattacaggtccctccctcaacacgtggggattacagttcaaggtgagatttgggtggggacacagagccaaaccatagcaggtatctaaaataaaatttagatatttagccttagggaattggaatccatcctttggggcaagttcacctggcttgccaggtcctacgtaatatggccatgtctttaacctgatttcctcccctacatctcctcccattctccccttcaatgcactggcctcctttcagtttttgatgcatgccctgcactctcatacccttgcccctcctataccacgaccccccaccacaggacatttgcacatctacctctctgctttgtctagtacatttctactcctccctcagatttcagctcagcagtcatctcagaaaagctttccatggccctgtagttagatcaaatcctcttattctaaaacacacatatgtcttttagcactagcaatggttatgattttgcacttattattcataatgatttaataatatctttctcctccactggtctctgcatctctggcaggaggtggtgccacatttcatccaccagtttaaatctgaggctcgcccagcacagactatgcacgcagtgaatatgcactgcctccaagcattcttgaatgtcaaagagtatccagagcaacagtgttttctttaaattttattcaatgccctctttacagtaaatttatgaagatagtgaagctataaggagagagtacacttacagggcaaaaagaaaaatagaatcaagtccaataacaaaatatgggtaaatggaaggcagggtactaaaaataataccaaaaactaccacaagacattaaacattattctaagaaattatatggaggaatttaggatattagcaaaaaaaatctacatatttcaaattatctttaaggaaaatattgtgccatgttaagatgccccattcattactgaaatttgtgagaactatgacattatagtaacaatagcaaaggaagttgcaacaaagataatatcttagatcagcactctccaacgtttttggcaccaggggccaggttcataggagacagtttttctacagaccagggtgggggaagtgggtaaggggatggttccagatgaaactgttccacctcagatcaccaggcattagttgaattctcataaggagtgcacaacctcgatccctcacatgcacagttcacaataggtttcaggatcctatgagaatctattgctgccgctgatctgacagaagacggagctcaggcgggaatgcctgcctcctgctgtgaggcccagttactaacgggttggggaccccttacatcatagagtgtggtcaattactatactggctaactataggagttattctaaaatagatacagatatgtttaaatattgactagtacatgacaagaagtttattttaaactctataaaatttgaataacatgaacataaaaatcttttgatttatcatgtaatattatatgtgtatccttgctacagggaagttatggagaggggaaaacactcagggtttgaaattagatgtcctgatgtcaaaccatcagatccttaggctatgtggccaaacttacttccccatcagttggacatgtctaagttccagaaaaatgactgtctccatactttataaattctctgtttcctcaaacacgcttgctgcattaagtgtggatttcactcatacttatagaaggtgaagtcagcttttccagtccatgccacaggttactgacagcaataaaataggaatgattcagatttaatcactttcctccccatctctccgcccccgctcctctgtgctatcttggttttgtgtttttagacacgtcatttaatgtctctaaacttaagtttccttttgaaaattcaatgagatattgtttattaaagtactttttaatgtaccccagaacttaaagtataataaaaaaaagtgctttttaaattcagaaaatgtcctacttttaaagaacttatgccactaagtttcgaaaaacagctagtcaaattttactttgagtgtaagtcgcatctactgatccgtatactcttcattcggtacacaggccatattttcatatcagtgattctcaatgaaaagaccataggatatctcagtatttcaataaatgctctttgaaaagataaaggtttttattagcaagtataatagccacactagctgatttatatgcatggagtacatctactctttctaatcgagatatggtattatctagtcaggttgtgcttctgtgttatcaagtgagcaactaccaaattccttcaatttactttccatcccattcccacaccatgatctgtgtcagatgctcagtgtgtccctgttattaaggagtgactatgggatccaactgcaggaccacaggacactaaggacccatagtgctaccatcacttattcattcatcaatatattgagagctgactccattccatacatggaatagatactggagtgtgaagtagagagggcaggaatactaggatgtagccccctccaaaaatgtgtatagtttcattaaaaataaaagttcttatcaccttatttccacatctctggttcaccaggattgtgatctaggaataaattctatgtattcttacctcttagaatctagcttggcatttttcacgcttacaaaatatggatacatgtagacacataggggaaaaaaatgatttaatactttgtcacaaattatttgttttaagcaattattttaacttttcagattgtatattcagaggatttgtttgctttatttctgggtttgtttttctaaccatatggacagggagaaatcagggtgaggtgatgcaacttcagcatggtgcttggtagagaatatggttttcaatagaatatatgcaagtcaaatgttaataagcccttgctcagctgtatgtattctctagaggaaaagctcgcattctcaccaggactaaagcattgggagctaagggaaataatggcaagtgatgtcacttcctgaaatcactttttgcacaaggaaacaatcatcccagcagctcctttactctcatattcatctggcacctacacagaaaataagatggaaagagctgtgaaagtactacctgggtagaaatgttggaaggggatttaaaggccattctatcttttggccacaaccaaataaattacactggattaaaatagtacaggtcatttggagaaacacagcccaaggacctctacatttctaaggcagaccaaattttgaattaatcccttcttgcttcggaatgatgaccaagattaaatatagaaagaaaggatttaatttcaattttgcaaagactctttcaatagtttcaaaaatatgtctttctctttgagtcttggcaaaaaaaaaaaaaaaaaagttgatctgcaaatgcatattgaaaagcagtgtgctgtaaagacatgctgtgatcctatgaacttctccgaagctataaaatgccagtgctaggtcttgagggaactggcattattcattaaactccctgtagtttgaatcccagtgtatgttttatccaaggttcagagtgaagagaaaaaggaatagaaaacacccattttaacacttttgtcaggttgaattaaggaaaaaaatgatatagggaaagagtctactttaatttgaagataaggaacggagcttcaggaaggttaatatctgctcagaaaacaggaaagagaattagagtaaaaaataatatgtgtctctcctttgatactttttaacttctctgaaaccaaactgtgtttggtttccattttgacattagttaataagtttctatgacaagtctttagcttttgaaacttggtgtacaggattatctttaaatcacagtttcaactcattcaacaatattatgcatctcttttgtatgtggcacactatgtgaatacaaaagcatagacgagagccattttccttatgaagtagacaaggtagttttaaaggaaagcaggataagtaataaaagcattaatacattataagaaggtaacatgtatttatgtgtccaactagtatcaaggcaagtgtgtatgatatgagagaaaaacaatatgaaccaagatatttgggaagacgttcaagcaggaacggaactctgagctaagttcctttcagagttctgtagagaaacagaactaattgttaaatattcaaaaaattttgaattgattgtttaaccttggtaaaccttggtagcttgaagcagaactttggtgtaaaccttggtagcttgaaccagaccacagtggaagaatttatgctagggaaattgacaaaccctgtaaagcaagatacttttaatagagctggtttactagcacaccactgccctgtttcattattaataaaacaagaataatagtatgtgcctgccaatattattgtgaagggttcagatgatttgtaaaatgtctaacatgttgtctactatgtagtcaattctcaacagatgacagccatggttataaatgtaatactgtgaagagactggtcttgttaaaggagcagcagggtgcagatttgaatcatgggtgaagctggcccagaagacagtggtttttcagcaccgctgtaacaaagcataacttcagatgctattcttcataagtcatttttttaaatcgtgaaacaacttatatccattagaacaggagtccccaatccccacaataccagtttgtggccttttaggaactgggccacatagcagaaggtgagcagtggtggagtgaagcttcacctctatttacagccactccccattgctcacatttccacctgagctccacttcctgtcagatcacgggcagcatcagattctcagaggagcacgaatgctattgtgaactgtgcatgcgagggatgtaggttgcatgttccttatgagaatctaatgcctgatgatctgccactgtttcccatcacccccatatgggaccacctagttgcaggaaaacaagctcagggctcccactgattttacattatggtgagttgtatgattatttcattattcatcacaatgtcataataatagaaataaattgcaaaataaatgtatgtacttgaatcatcctgaaaccatcccctacctcctgatccatggaaaaactgtcttccatgaaaccagtctctggtgccaaaaaggttggagaatgctgctttagaagaaagaaaggtcactgaatgatatttaagttttcccataacaggttatgggctctcagttatttctgaagtaaggagaactggtaaggctgctgaaaatgcttacagtgcatttttgaaaaccatttggatgatttgatatcacttctttaactattaacatttctttactgaaagtgatacagacgcttttattttactaaattacttctcaattatttagcttatagtatgatcttaggtaacaaagctaattttatattctcttgtgattattaacctaaatctggtataatgagatgcttcctcccctcaggagcggtccagctgtgactcagctgcatcaaatttatgtcttctgaaattaagacacctggatttgtttgctaaactctatttaaaaactactcagtgaggattctcttgattttgcaccattcacaggaagaaattctgaaagttgaattattggttcccgtattttttattttttatttttttttataaaatcatgataaacagaactcttacttcatccattttgttgttgctgttgccgcattttgctttttcttcctcctttcctctccctcttggcaaaagaatgctacaaaaatataaagattgttgtaatctggggcgaaattatccatccacctaaataatctcctcctgttatctttgatgaatatgtctaacaccattaataagcaatagtttcttataaaaaatgcagccgtttccaagaaaattttgatgcttgacttttggggtattctctcatctgacttctttcaaatgtttgtgaaatcgctgatttggaaatctttagacttagccaataaaagtgaaataatgtaaatggatatggatttgaataaagaatatggttttatttttaagtaaaatgagaaaaacattcaagggctcgtagtcccttagtttcatcacccagtttcatcccaaagctgccatagaagctcctgtctgaaaaatatgcctactctactcttgaaagcccattcttggcatcacggatgccaccaccaaatgccagacaatgttggcaactacagaattgctgtcatttctcattagcaggcatcaaaatgtcctaatactctctgccactatctgggcctgttgagatattaattaaacatgtctttcttgccaagtcatgtgatcaactttcactaggctaggtagagccaagtgagcccatccaactacactggataaagaaatacctctaagaatttgtctgtgaagaggaaaatgcctcccatttgtattactgcaaaggaattcagagctctagaaaagcctgtgtgtgttttctaccatatggctatctgttgctgagttatcccacttagagaatattcaagcatttgatggaaacatatccctactcagaaaatgagctcctctagagtttgaatgacatagatagagatttcctgagataataaaacctgcattggggcaggccagactgattgtcctacaggttcctaaattacctgaagctaggtggacagcacaaactttgttaatttattgtccaaaagcactatttttcttttgtatagttctttaaattaagctgacttaattaagctctgtgtaagagcaaaataacattttctggacttccacaagggagagattctcaataataaggattcctgccttcccacagcatagcagttccaggagagaagtactgggattgcatgcgtattagatgcccttgagtaaggcaagtaggaaactccagacagcagtacttgctgcttggttgttagtataggtgtctactcctgtgtgttacagcacctgatgggaaagcccaagctatgataaaaaaaaaaaaaaaaaaaatctcctctcttctcagctgaccatgtggctgattagccacaaggccagtcatcccaaagggtgctgaagagaagtgggctgggaggggaagcccagtgatggatgatgaaagtgcagtcattgcaaaacaagtccttctcttattgttgctagatccactgcttatgacctattttccgcttttaccagataaaatgtaccatcaactctgtcttgaaacttttgctttcctgcagtgtgattgccacagttccactgaacagaggtcattttcgctaagcttcctttctacagtctaaactaggtttttgagctaacacgtattttagaagtaaaaataatactacagaatgatgcatagggcaaaaatagtatagaggagaaatttattgagaagcatttggattgctattagtaatcaagaaaaatgtttattaataagtaacatttctcctcttcctttatacatatagatgagatattgaaagaagttgaacatagcagaagcatgttagtctaaagcccaagtaatctctttgctatttaaaaattctaaaggatttgaattaggatttcagttcacattcaaagtggtagttttttttcccatttgtcatcaccctatgcttctcatgcactacctaccttaagatgaaataaatgaatatcaggtagtaaattctaccacatgtggttattatccaaggaatgggctcacattgacacttgattaacatcagtttcacatgtggtaataaaaaaaaaattaatctgtgcaaactgtaattgtcatgctgggatcatttagattccagcagtctctctgttgagcagtttaagaaaactgtgttttcattgtactttttaaatgaggaagcccagtggaaaaatcatatttgaatcttgagaaatcttttgctttctaaaagtgcagtaaatgaatataactttgatggttgggaagatgagcttgttatccacagacttaaaaaattaagaataaatatacaagttttttggaggggtaatttagtagatattttaaaatacttaccagccaggcatggtggctctcgcctgtaatcccagcactttgggaggccgaggtgggtagatcatgaggtcaggagatcaagaccatcctgtctaacacatggtgaaaccccgtctctactaaaaataaaaaaaatagctgggcgtggtggcaggcgcctgtagtcccagctactcgggaggctgaggcaagagaatggcctgaacccgggaggcagagcttgcagtgagccaagatagtgccaccgcactccagcctgggcaacagtgcaaaactctgtctcaaaaaaaaaataccgatataatgatgtattaaggttagcaactatgcctaaaaaatgagtcctctgaaatgctaccttcttacacaggtctgcaaccaccccaatttcccaaattttaccctagttctctcccccaagcatgtggctacctactagttttaaccaaagaaggaaggctttaagcaggagggagaaagaatatggagacgttaggagagtgggtggggagaaaaggaggagagagctgcactcttcatctgtatataagatcatgttacttgcaaacagagacaagttacctctgaatggcaaggctgagaacactagtgtttctagctctgtgctttctacagtgtgatttgtggacaaatagagggctttatatgcattgcaagtgaccctgaagataatataaatgcagcttagaagaagtagaaatgtatctatttttaaagtaatcttacttcttaccttagatttaaatatatacttaaggtcaaaaagtatttttaaaatcaaaagaacagtatttttttccatgtaaaaccagagcaagatttttttttaaaaaaactggtagtaagcagaagtgatttcattaatgcctctttggaaacagtttatggataaaattagcaatatgatctatcactgacatttactcttttatcctttatgcagaagggcttttcatttataacaatgagagagattataaatcagttattaaaaccttatcaaagacaaaggcatagacatttttacattaaaattatgaatgcaaaaacagaccagcctggtctcttacaaaccatgaacagtataaacacattgacagttcttatactagatagatcctaaataaaaatgaaatcaaataatactcattcctggaggtatacctcatataagtccctttatgtcatcagcaaccctattgtattgacataagctctctatccactgttcttcttaatgccaccgaccaggtgcttttcatctttgaacacaaatgcctatcccactgcttagtgcttggtaagtattaaatacaatttggggcaactaaactgtaactgtgtctgaatgcacaaacacacacacatacccccaaatatatacacatacctctcaaatgactgtaaagataggttcatcagactcggaacatacaaagcccttgctacataagagaagctttctctgtgggatacagcatcttaaattcttttcaattctcaataagagagaagaactttattttcatttggtaatgttcctgatatatagtacatgatattctttatgccaagttttgttctatcaaaaaatatctgacacttccaaactcattttatgagtccagcattaccctgatactgaatccagactaggagactacaattaaaattacaagtcagtatccctgatgagcatacatgcaaaaatcttcaagaaaatagcagcaaaccaagttctacagcatattccaagaattatacaccaagatcaactgggatttatccctggatgcaaggatggtttgatatatctaaattagcaaatgtgattacaccgtataaacaaaatgaaggataagaatcatatgatcatttcaacagacacagaagaagcatttgacaaaattcaacatcctttcataataaaaactctcagcaaactagatacagaaggaacatacctcaattcaataaaggctgtatgtgaggagcccacagctatcatcatcctcaatggtgaaaaactgaacgctttccctcaaggatcaggaaaaagacaaggatccccactcctgtcacttctattcaacaatgcactgaaagtcgtaagcagagcaattgggtaagaagaagaaaaaaacacatccaaatccaaaaggaagaagttagattttctctgtttgcagatgacatgctcttatagagagatgtccctgacttcaggtggtttgacttacaactttttcaattttatagtggtgtgaagccaatgcaatttggtgtacttcaaattttagatcttttcctgaactagcaatatgtggttcatgagataattcacactgtattaaaaaatagactttctattagatgattttgcccaactatagggtaatgtaagtgttctgagcacatttaagtttggctaggttaagctatgatgtttgctatgttagatgtattagatacattttttacttttggtattttcaacttatcagtttatcagtatgtgaccccatggtaaatccaggagcatctacatatagaaaaccctacagactccaccaaaaaactattagaattaacaagcaaattcagtaaagtggcagtatacaaaatcatacaaaaatcagttttgtttctatacactaccaatgaactatctgaaagaaaaattgaaatcttcccacttgtaatagtatcaaaaagcataaattacttaggcatatatttaaccaaagaggtgagtgaaggatccatacattgataccatgaacatggatgaaaaaaagtgaagacgacacaaatagatggaaagataacccatgttctcagattggaagagtttaacagttagtcccactaaaatatccttatcaatgcaagctatacaatcaaggaatctctatcaaatttccaatcagatgttttatagaaatagaaaaaaaaatcctaaaattcatgtggaatcacaaaagaccccaaatggacaaagcaatagcaaaagaaagctggaggaatcacatactaagtgtgagggaaatgcatatcaaagtcatttgtgacaacatggctaaacctagacagcataatgctaagtgaaataagccagacagagaaaaacaaatgctgtatctatcacttatatagggaacctaaaaaaaaatgaaatgtcaaactcacagaaacagggagtaaaataatagtaaatgcagaagctgagggtagggacaatggagaaatgttgatcaaaaggtacaaactttcaattacaagatgaataagttctggggagctaatatacaacatggtgactacagttaattatactgtattgtatacttgaaatttgctaaaagagtagatctgaagtgttctcacacaaaaaagaatatctgagttgatgggtgtgttaattaacccgattgtggtaatcatttcacaatgtgtgtgtgtgtgtgtgtgtgtgtatatatatatatatataaaacaaatcatcatgttgtacattttaaatatatacaattttatttgtcatgtgtacctccatgagactgaaattaaaaaaagaaagtagcaggaaaagtaggcttcaatatcaacacaatggatttttggacattttgaggcaaggactctattatacacatcagaagagtgtagaaaagcaatagttgagcgagaagtaccctctgtgcttttcctgacagatgattccaaggcataggatgctaagggtgtttgatttctagggctgccattaataaataaccacattcttgctggtcaaaacaacagaaatttattctctcacagatttgcagtttagaagtccataatcaaggtgctggcaagcccacgctccccttgaaatttctaggaaagacttttctttgcctttcactggcttctattgattgccagtaatttttggcataccttgacttgtacatgcctcaatctattctctgcctccttcttcacacagccacgttccctgggtgtttctgtctctgtccctgtgtcagaatctttctctcctttctcttgtaaagacaccagccattggattgagtgtccacattgatccagtacaaattaatcttgacaaattacatctgcaaagactgtattcccaaatacgatcccatcatgagtttgggtggaagtgagcttttgcaggactctctacaccccgctttgccacacctgctcctgtccagcacggagctccctgtgtcccctgtgctttcccagctccgttatgccatcccctaacctgcaccccagattactcttctccccacttttaccacactcaaaatttactttctgtaggctccagtcacattctctttttattttgtgaaatcttgtttgctcactaaaacttaaacggatttctcttttgtaaaaaaaaaaaaatatttttgacagcaattagttctgtgtaatgtctctggtatttatacactcagttaattttttttccaagtgttttacccacagttttttctcccagaaaataaattgtgtaggcctaagttaactattctgtctctctttttgcaaaacctaatagtctttgttgattaaatttttcattttgaacacactctgtgggtttaaagaaccctgaggagaagggagaggagagtatgttaggtattgaattttcattcttcaaaattgcatgtaaggaagatattttatttttcagatgaaaaagctgaggttcaaagttcatggcagagccacaatttcaaaccatttcctgttgattttgtgaaatctgtgcttgtccatactccctcccttctgccatggcatttccaactctcagagcaccaattccaaacagcctggagactgggaagtggttctgagaagttggttttctattggcagctctagtagagaagccctgtcctgtagctcctgacatgagtccccagtgcatcagcctgagagcagctgctgtgggagtaagttcagggtacctctgagaaaagagggggccctcactgacctagaggcatgtatgaaaacctagggctcccaaggggtcttggcaatcatttattctagctacctcattttatggagacagtatataatcattaaaaatgttttagtccgggcacagtggctcacttcggtaatcccagcactttgggaggccgaggcgggaggatcacttgagcccaggacttcaagaccagcctcgccaacatggtgaaacctcatctctactaaaaatacaaaaattagctgggcgtggtgttacgtgcctgtaatcccaaatactcgggaggctaaggcaggagaatcacttgaacccgggaggcagaggttgcagtgacccgagattgcaccacggcttggggtcctgggcgacagaatgagattctgtcttaaaaaaaaaaaaacaaaaaacctctgagaaagaccatatttaaattacattaaattttggagttataatcacattaatataaattatatcgagattgtattttttgtttaaaaatataatttaaaaactatattcatatatatatatatatgaatcagaaagactcatttttccaggcattttgggttagggaaaatctgtcctttgcttccccgaccattttgaatgtgattaaatatgcacacacacatgcacacacacacgcatgcacacactgatgcaaactttagcaagtgacatgagggtgtcttttcacaggataacttttttcatttgattcctcattcataaaacactagtatgatatacatccccacatagattttccccgtttctataaaggatgaagattcaaatgctgcaaagctcactccgggcccctggctcagaaacagttctctcagcactctcctgacattattaatggccctgatgtacaaacccagaataaaatagaattaaaatccaaagttaatttcaagctccattagaaattaaaggtgttgggaaagaaatcaatatttgcccagtgcaaaatgactaaattcaaagcaattaattctattattttgtaacttctaaaaactataaaagaccttcaaacaataaaatgttgccatgcgcacacacatatacaatgtgtgactaaaaataatgagaatgatatccagcagcgacatgcaaaaatctcttttattattttatagccacactatgtagtgtacacactaaagtgtgtcttaaaatagagccaattattccataaaattcgtggctatttccagcaattatcagcacttagttgtaaatctgggagaatttaagggacagaaacaatgcaaaagagcgaggagattaatttaaatggaagaaatgtatctgttttcttaattttgctttctctttttccagcttctttttatgtaatgctatcgatcaccaaacaaatggccttaaacgctgtagttcccaacaggatgaagtatttcacaacctgtagagctgtaggttataatacacataaaactggcactcggtaaaagctttttcctgtcagaatcattgccatttcttccctgtagtgccttttggagaaagtctgagttaacaaatggatcttttccaggtgcagaaagatcagagtcaaatgggtttggatcagatcttgtaacgagaatgtgtcactctttccctccccttgtcaagaaggagtctcttaagaaccggctcaagcatcacttatcattacagcagactggggtgaacagttgtaaaagataatgatagaccaaaccagttcttagctaaggagatgtcatgagccttctgatgaaacctttctctctttgtgatagagatagtcaaaatgattaaggactactagcaacagaggaaggcatggccaggcactaggaccattctaagacccatcaatatgaggaaatggagccatcgttggccaaaggctcgggtccttcaagtttctaaaattttttgtttgtttgttctgtttgttttttgttcgagatggagttttgctcttgttgctcaggttacagtgcaatggcgcgatctcggctcactgcaacctccgcctcctgggttcaagcaattctcctgcttcagcctcctgagtagctgggattacaggcatgcaccaccatgcccggctaattttatatttttagtagagacaaggtttctccatgttggtcaggctggtgtcaaaatcccgacctcaggcaatccacctgcctcggcctcccaaaatgctgggattacaggcgtgagccaccacgcctggcccaagtttctagattttgacacgtccttccagtggctgctaatcaacccctggccctttgaaaagttgtatctttttaaattgatttctttcaaaattgtactaaatgtagttagttgcccggaaggtgtgacttgtttaacctaatgaatcaaagctgggctttagcagttgagccacctgggccactaacatctacccactgtctggttttccacactagctataacaaaaacacacttgttagaccaaattgattttctgctctctttacgtctccaaattactcagctgtttcttccttcctgtgatattttaaaaggtctggggttctagccccaactctgtcacttactgtgggtgtgagctgaggctagtgatttggcctccctgatcctcactcccctctcctgtcaaatgaaaatgattgtatttaccttgtaagttgttttcttaaaagaaaaaaataaaacaatttaaaatgcatgtgaagtggatgttcatgatcagacctattgtagactctccaaagtagcagctgtggacattaccatggatctccattttcctgggtttcccaggactgcacactctctccccgctctgcttccttcagacctactctccagagagcttctggtacctaatattagtgtttgtaggtgaccataagtcaagttagcaaatatgacatataggaaagtagataagaatgcaggggtatgaaaataaggtaaaaatggggagtaacatgtgtttaaaaattgttaatctttctcaacaacatttcttatggactcagctaagtaacccaaggaggttgtctctcttcacccgctcctccccacaccagtccacccttcaacccttcaacgtggctaccatcttctctatatcactggatcgactcttgtcagttacttctatattggcaaattgatgttaacttatataaatgggacatctatattttatagaagttgctttctctttctttctttttttttttttttttttttttttggagtctcgctctgtcacccaggctggagtgcagtagggcaatctcggctcactgcaagctccgcctcccaggttcacaccattctcctgcctcagcctcccgagtagctgggactacaggtgtctgccaccacgcgcggctaattttttgtattttttagtagagacggagtttcaccatgttagccaggatggttgatctcctgacctcgtgatcggcctgcctcgtcctcccaaagtgctgagattacaggcgtgagccaccgcgcctggccactttctctttcttatagtggtttttctttgttttctgtaactcagcagctcttcatttgggttcagtgtagttcaagcctctgcttctcagtatacttcctgggctttttctttagccttgtcctccagtagtggtgctctccagctgtgtcctcaggctttccttctcaacatatgcacttacccttactgtccctaaccatggcatcaattttcatttacatagtgattccttcatccatattgccactctagaacattttgctgggcccattaaatgtcctggtggacagtgaccagcacatagtagaaatgtaataaattattattgaatgaatgatgtctctagatcctagccattatatccctgcatcaagcttggcatattgaaaatcaacttattctttctgccccctgtcccccattccaaccagacttccttttcctcctgcatttcctataaaggaaaaacggtcctttagcaacccagccactgaagccagtaatctagccacatctaattggtcaccaagttcagcatcttccatctctggaatgccatttgtatcccatcttcctcttcaggtcatacttcaacacagatactccccatttctgaataacagcaaaaaccttgcaactcttgatttaagggccttcagtttatccttcacacatctgcaaaagtgagaatttgatgccatgacttatcaggtcttatcaggttaaatccggatattctttggctgtgtccccacccaaatctcatattgaattgtagctcccataatccctgcatgtcatgggagggacctgatgggagataattaaatcataggggcagattttcccgtgctgttctcagcatagggaatacgtctcatgagatctgatgattttttaaagggcagttcccctgcacactctctcttgcctgacactatgtaagacatgcctatgactccttcgccttctgccatgattgtgaggcctccgcagccatgtggaactgtgagtccattaaacctctttttctttataaattactcagtctcggatatttcttcatagcagtatgaaaatggacgaatacaaaaccctttaataaatctccaaagttgtaaatataaaatttgaataaactaatctcacaaaatatgcataatctagttcctgtctttgtatagtttaacctttacccagttcccactcagctgcaggcattctgagcatgctataatgctttgtacacgtctttgtatggaatgcaaactccctcttttacttaattatcattggcatgttcttcattactcagctcaagtctctttgattgcaggaaacattgtatcatcccaaatctgatttagggcccccactctctgttctcccacagcatgctgtgcagaccgtgtcatagaaagagcaatacagagttgtgggatatttgctttttgatgtcaaaaaatatcttattaacttctcataccaaaaaacaggacaggactgatgcaatagttattcaacaaatgcttgtcatataatgaatggaaattccatatatccagcctgacactcccgaaattacttactggtctgacttttttgcttgaaggaaagcagctggacttgggttaaactttcactcttctctttctctgtctcttcccttcattgtgctttttctttctaacctgtatcaaatgagagagaacctgatattagtcacatatttggaaattttttggtatcactgagatttggtccctctcactgtcttagcagttacactttaagctggcttacatatagttgtaaaaagaaagactaggttccccagttaaagaaacttcagggacagaaaagctctcttctgcttgtttccttgcttgtaaagttagtctttgatataaagtttaatccttttatgctgcctggaatgtgctcagaggttttctctgcagattgtttcatctggcagttaattcctgggtacttctgggaattgaaggaaagaggtttttgagttttagttactgaacttcgataccaccagtcaatccaacagttctatgtctgtatggttttttgctttgtttcctctaaatcggtgattcttaaattgtattttatttgatgggcacatgagtaagtcaatacaagtacagactcctgggcaccatcccttctgattcataaggtctataatagagtcatggaatctgaatttcactgggcttatgagaagattccagagcagaggattcgtgccagtgtgactagggaatctgttttctctcttagcctttctatctgatcagaagatgaaacctgtctggggttctgcgtattctaattctttctcttctttgacttcaagttccccagactctgagggctaaaacccagtatttagtggccttttacagagcaaattggctggccattccaccttatccttgccatgtaagccaccagccatgcagactttccattacctcatgatcaagagtttcagtctcttcaccctcaccaggacagaggacatagtcaaggagatccctgcagaatacactgacaaaggacttcagaaataaagggagtcccagttatgaggatagcagacaaggaaatatggtagagcttatgttctgaatcaatcatttcagattctttggtttttacattgaacatgtatttgtgattactacaaatggttccaaaaaaaaaaaattcccaaaaagtaaaagtacaaccaatgccatacaaaatagattaaaaaaatctccaaaagtttaatggttcataagtacactcataaattttgaattattattaattcataattcccaagtagtatgataactagtatgcactttacaaaaggcttggtaggttaatatatgacaaatattgcttggaaattttattttattacaacactcaatttctaaattttagatttcataagtaagtgctcctgtgatgggcctacaaccatatatatatatatatatataatgcttcctcatatatatatacatgaggaagctttagttactgaacttggataccaccagtcaatccaacagttctatgtctatatggttttttgctttgtttcctctaaatcagtgattcttaaattatattttatttgatgatctcatgagtaagtcaatacaagtacagactcctgggcaccatcccttctgattcataaggtctgattcatatatatatgtgaggaagcattatttcccactgttctgaagcagccaagtaagaattaagctattgtgtcggtgcatacagacaactgcagtcctttgcagtttttcgcccctctggctacctttattatgtcagtgacaaaaggtgatacatttagtacatcgtgaataccgacctttcacactctttgagcccctctagcactttttctttttgttctgatcttcatacactatttaagagtgttatcagcaccaagaattcatagagtaatgattccactatttaattcttcatttctttaaacaagtttttttcttcctcaagccgattttcttttttaatgaaaaagctaattatcctttaaaacaacattttttttttttgcattttgcaataaagctaggaagtaatttagtaactttctaatagtaagttaatgagttttatcccagatctagtatcgtggggcatattttttatgtgtacataatgtttctaaactaagcccagttaatattttcttttacatttatcagcaagaaagagagaaaggagactaaaaacagacccatagctccccaaagtgcttaacaggagtatttaatggcatccaatcatacttagtcgctgtgtagatagaaagctctttgcaacaaaacgacaaagatcagacaaaccactatagtagccaccagagaactttgtatttcttatgtccattctgggctgattgtccctaaataagagctaacctattttctctgactttacatgagcaaagaaaatgccttcaaagtgctttctatagcaggaggtacaggtgccaacgtaaacctagataaaagctgtttgtatatttatttgtttgcttgtttttatcacactcagtggcctcgtgatgcatgtaattaccttgaccaaagcataatagtagacagcattaccttggaagagtcttagtaagatacaaactggacacatttttgagagaagaaataataggagttgggtgaaaacatatacagcatgggatcccacctaatgcactttatatcctaaaatagggagctctccacactctcaccatcgccgtgcccacacatctcatacgtgcatgcactcatgtattactaattctgtggtgtcacagtgtccacactcccatttgcagacttgtccttttgagacagttttttggaaccagggagcacttttcttgatagagagaattctaaatttttttgcacaatcaaaatcttcagtactaaatattcacattagcaacataagaaaagtgtccatataaagactaattgtccatacaacagttcctaatgttacattttagttagatgatctacagtttaggtcacagatactcagacctattccagaatctagccatattcaactttcatacatcattttttctcataactaaagatcaaagtagtaggaaaattttcatgatattgcaaagagatttttaaaaatacattagcttaaagttatttatcattaggaacctaagttttattcttatttaaagaaccataaatagaatttaaatcaacatctatcaagatctgtctatcatatcaccttccagaagtcaacactgtaaaactcaaatatgcgtggcttttggacaacaattccatttttagaattgtatagcaagcaaataataagacagagttacaaagatttatgtatgcttttcatctcagcatagttttgaatgatgaaaaatgtgaaaatattttaacatcaatagttgtatggtaaaataaatgatctgatgacatgctaagaaacaattagagttagcaagcagagctatgttgtttgacagagaaaacataagaaacctactctatactaaacagaaaataaaactaaaatgaaaatacctggttgaaaatataaagaaagaaaaaaacataaagtgatatatcaattttaacagtgatattttccaagtaataagagtaggtcatttgaatattttttcatatttttaataaattgtttcagttgaaatcaaatgaaaatctattatttgtataataaatgatacatgtattttcatttaaaaatatttggtaaagagaaactaaagaggaataaaagaccagatgtttagttttactgtattttaaatctgtactcatatttgaaatacctatttgtttgtctaaatgcccgaatggattataatcttcttaaggcaagaggccgtggattgcccttttttttttccattgtacccctacaaaatagtagttgcatgataatgtattatgaataaatgtgtaggtggccttggtaaagccactttctctctttgaggctcatttttctcatctagaaaataaatacagggttctctactcacctcgctggggattgctgtaatgctaaaaggaggcaacacatgttgattataaagccttccatgtatgtgaaggaacattatttttaaccacagtaattacactcatagaaatcagtgaagcaagtgttggattcccatccccaggcttggctcaaggccaaatacaaaatcatgaagcaagccaaaaatacaggctgcacaagctgctcatctgtgcctgccttcctcactttagagacatagcctgccctcaggttccctgcaccttcctgctctatctctacctctcatgtaaaagtgtattcccattaaaatggaaccagagacgcatgcttcaatctgcacccgggggatatgcgttttcaccagagataagaaattatcagacaagaacaggatcagacctggatttttctgttttggaagacacacctgaaatcacacacccctccttcccctcatctgaaggccaaccaccaccacatggtcctttcaccagaggtagagagcactttgacactcagatctctgctggaaatgaaaacaccataaatctactcaagcaaatttcacccctctgtaagaaaaataacacatattattaaaagttatccttgtgttacatgaaaaaattagaaaaaaatacaatgacagtaggctttgctactatatccccataatcacagtcataatgtattaggtactaagaacaatacagaacaaccatattggtttattcagctgtttaattagatcacagttttttggatagatgaaggtataaaatatatatagatatggatattataaatcaatagatgtagatagatttttacatctattttaattttttttctgtttataaataagtaaaatcatgtattttatatatttaaatgtgtatgcattttaaataggtttcaatatttaaatattaccatctactttaaaagtctattatatatttgtttcttgtttttcaagctttttaacataagagcctgaaaactattctaatgaggacaaagtaacagaataaacctaggcacatgcccaagggaatgaagtttaatggactgtttagaaaagcatgaggttaattaggttaagattcttagaaagtgagatttgaactaaaaaaaaaaaataataaggtgttttgctgttggaaatgagaagatcataaaattcactaagaacttatccacagtgagtatagagaagagaatgggccatcctacccattgctgaggccaaaacccatcctggctgcctctctacactcacaacccacgtctaccccatcaactagttctgctctcaatgactctatcaccgccattctggttcaaacaccatcgtcctctgtctgtttttgcagtagcttcctgccttagtcgacctactttcacccaggccctattcactctcatcacagcagccagtgtgattctgttaaaatatgcattctggtcatgtccaacctcatgttaaaaacaacagcctccaaggccctgaactatacctcgatgatcttggcttctactgcccttccccttgtttgctcactcagttgctcacacattttaatcatactggatgtgttgctgtcccatgaacacatcgggcaagcattagattctcagggcatggcgtgtgctgttcttccaacttacctactgcatggcaagatccatcaactccatccagtcattgcccagatgtcatcttctcttgaagacccaccttaacaaccatatttaaaatagtaacctcacttctgttttccttatctcccttatctgctttatttttcttcatagttcattatattctttttttgtttgtttgttttgagacaagtctcgctctgtcgcccaggctggagtgcagtggtgtgatctcggctcactgcaacctccacctcctgggttcaagcgatcctcctgcctcagcctcccaagtagctgggactacaggcttgtgataccatgcccagctaatttttgtatttttagtggagatggggttttaccatgttggccaggatggtctcgatctcttgacctcgtgatctgcccacctcggcctcccaaagtgctgggattacaggcgtgaaccactgtatgcagcccattatattctaatatactgcatcttttgcttatttgtgtgctatatcacctgtctcccgcaattagaatgttaattacatgagttcagggacttttacctgtctattatgtttataattgtctccccatctaaaatagtgtccagaacattagtaggtacacaataaatattttttggattaactacattcatttatttgtgctgggaacagcaacaaaactagtctgaagagaaggggctgaaattagacctacaaaagcctgattcagtagatttttcagttggaaaatattgagtgcttacattaagatagttatggtatgatatactgatactgaaatgaaaggtaaaaaccaaagtaaaatttaagtatagatcttaaaatgaatagccccaaaccatttcttactggaaaatttaagtctgactctattgctgctattatagcagagataagagacttacaaaatctagatgaattaacaaaagattaaaatcatttaaaatgttaggagaaaacttaataaaactcttataatgtgattgccaaaaaatgcacaaatatttccaggaagtgttaaaagttgtctattgctaattatatatttgtacttttttttacagctactcatgtgtagaacaaaaaaatagacaaaattactcaggctcaatgattcactatgtacagtttacaaattaattagcttctcttaattttttcaattaaaaaagtgttaaagcattagtttattgcttatttccgtgttaaaatgctggttaattgcaaaacattattaggggccaatattaaaattccacttacaagtgtcagagaagcaaaacacatttaaagttcatttgcaaatccagcttacctaaatctacttgggataaagcaatactgctgaagtacgtaaccacattctgatgatgtatgtgcaatagtttttcccattagcttactaatgtatgtgtatgagacagagagagagagaatgtgtgtgtgtgtgtgtgtgtgtgtgttactaggattagctctagtttttaacatcataacagaatatgaagcacgatgcacaaaaattcatttataatttataaacactgagcttttaatttcaggtgtttcttctttctagttctctatgtcaatcatatagctagatacaacccagaagcaactctcattcagaaaaccacaaaatgtaattaatttctttcttttcttttttttttttttttttgcgtgtgtgtgtgtgtgacataatctcgctctgtgcccaggatgcagtgcagtggcgcaatctcggctcactgcgaccactgcctcccggattcaagcgattcccctgcctcagcctcctgaatagctgggattgcaggcacccaccaccacacccagctaatttttttttttttgtatttttagtagagaccaggtttcaccatgttgggcaggctggtctccaactcctgacctcaagtgatcttccctccatgacctcccaaggtactaggattacaggcgtcagccaccatgccccaccaagatgtaatgaattcgattaagatttggaatcagtcttgctgagatattcaagaggaaaattgtgaaatgggatctgatgctattcacaaagagttcttcttaatgcttcagaggcagctctgactgttagggttagggtcttatatggcaagtacgaatactcctactcttaaatcttcaatacagcaggcagggagaacttccttgttgaatttttcaccatgtgctaaaaggatggggtgaacttggaaagaaacatccgaacgtcaacttcattacaaacagcaaattgagcagctgtgggagagaaagttcaattgggacataaaagatccattcactgatttcagaaaagctatttctgaaaatgcacaataagtatatagcactggagtagcaaaataagtgtaagtcaactatagaaagctatgataaacaagaggaacaataaacaggacctaagattcattcgcacatatgtaaataagactacagcacaaagtaagggatactctgtcagcattatttggcattggttgttgtttttgttcaaatgtttaatccatgtcccagaaacttaagatttcaagtccttaaaagggacttttaaaaagtctcaagtaacaatgaatggaattaacagttttttagccagtcattttagtgtcttaaaaatagaaaaatatttttatgaagataaaaagaataagaaccatccattgcgtcaccatctagaaataagcactgttgtttttctttttgtttcctttttcttttgagacagaaactcaatctattgtcccaggttggagtgcagtggcgtgatcatggctcactgcaacctctgcctcctgggctcgagtgatcctcccacctcaccgtgtctgttttgtttaagagtatatagttatcaatccttaaagccgaatttcattcttggtagttactgttaaaattaagcatgaacaattgaaagattttacaaagtatatctatcatatacctgcggtgtatcatccttggagaagaaatgaacatacactgaacatagaaacaactaaactttctagataaatggaactaagagactaacttctgtttcaaatgatgacgaatttcagaaagagaaaaaattaagtagaaaaaaaaggagaatgtgagagactggggagagaaaaaataaatgagagaaggtggtagaccactaggatgaagaagcagaagatgaaggagacaggcaagatgctgacctcttagctcagtcaaggtctggactttgggggcctgtcctagcatcatctcttgcagtctagcacatgtacatacagatgctatgagaacatatgtctgtcaaaggccagtgtttttctagatcagaaacattttgtagctcttccggtggacagagttggatcatgtgttctctcaagtatttttatagatttcagaaacactgaaataatcagcactgaacgaatgtagccaggcttgtttctaaccctggattctgtgctttgattttgctatcacgcccctcactgtcaaccaccctgaaaagagaccttataaaaaattatggctgggcgtggtggctcacgcctgtaatcccagcactttgggagggcaaggcgggcggatcacctgaggtcaggagttctagaccagcctggccaacatagtgaaaccccgtctctactaaaaatacaaaaattagcagggagtggtggcgggcgcctgtagttccagatactcgggaggctgaggcaggagaatcgcttgaacccgggaggcggaggttgcagtgagccgagatagcgccactgcactccagcctggcgacagactctgtctcaaaaaaaaaaaaaaaaaaaaaaattatgctgcagtttcctagggctgctctaacaaattatcacaaatgttgtagctgaaaacaacacaaatatgttatcttacagtttgggaggtcagaagtctgaaacgggtctcactaggttaaaatcaacaggaacgcattcctctgggaggctctgagacaatctggtccattctttttcagcttctggaggcctcccgcattcctgggcttagggcactggccgtcatcttcaaagccagcgatgactgatgtaatctttctcacatcgcattgctctggcactgactaccctgcctttctctttcacttgttaagatccttgtgtttctattgggcccatctaaaaaatctaaaataatctcctacctcaagatccttaacctaatcacatctgcaaaatcccttttgtcatataaagtaatttatccacaggtttaagggatagggcagcaacatcttgggaagtcattattctgcctacctcaaacctcaaattgtattctgtgattatttttcaaaggaataaacttggccaggcacagtggctcatgcctgtaatgccagcactttgggaggccaaggtgggcggattgcttgaggtcaggagttggagaccagcctggccaacggggtgcaaccccatctcaactaaacaaaaatataaaaattagctggacatggtggtgtgcctgtcatcccagctactggggaggatgaggcaggagagttgctggaacccaggagacagaggttgcagtgagccacagtcgtaccactgcactccaacctgggcaacagagtgagactccatctcaaacaaaaaagaataaattcataaaatcaaatatttttttactgtgtgatagaagcagaaattagaaagcattatgaccacccacgaatcataaaatctttagtaggaccagtaggttaacatttttcctgttggagggagcgtttctttgatatataaactttcaaggagtcattgaaagctttggaaggcttctttccaaaaataatcttttagaaaaagtctttccaaagaatccagtcgttgtattttgggcaaaatattagaagtatgagaagccagagtgtgaaaactgagttaatattcttatgaacacgaatacttggcagccaatattgaggctgaaaatgcatttagaatgttaatgtatttccatagtatttcagatcaaagatactgaagggaacttaactgcaaattaaaaatagagaatctacaggaataagttacatttcttatagcttcctgtgcaatatcaaatcaagtagagcaagaggtggttcctactttacataatttttctcagaaggatgattttgtttactaccattgccctgtaagtattatgctttcaaggaagctctaacaactggttatcgctgaggttagtgtctctcatggtactcgcttcatgctctgtccattaggtaaatgacatgcaaagatggcttcctctaagtttctgagacacaggtactcatatttaacttccgtggaggaggaacacaggagtgaaatagaaaggtctgcatttggtgtctgtcttcccatccattcctaagagaagatgacataggcctactgcttatcaagagcatttgaccctaatgagtgtcgttatagaaaagttagaacctttctataagactttgtattttactttccagaaaattccaattcactaaactgtccatttcttctcctactagtgtgttattttcagggtgttttcttcctattatagtctcagaaggcccatgctcagcttccgtagaccctgtcctctgtcagtcagtcacttcatttacccctaggttttgactcttcacagatttctggatatctccctccaaagggatagctcttctgttgctaatgactagcatgagggttggtaagtagtgacagtaaaattaacattccttgaccacatgaatgtgagcaacgctttggatcagacacctgatctctgccacaccttccagattaagtcaaaaatgcctatcttggtattcagggtccacccaatctgcctttcctggctaattttccatgtctctcctatgttaaccctgcattccaaccaaatggtctgtttcccattcctggaatccctaggataaattccattaatttgcctgcttcggtgtagttgttcatgccattctccttcctctattgatcatagttccactataattttgttgtaattatcgggaaccaaagaagcatgaccctttcttctcatacaaggtttggatcaatttagaaataagatgcctagtagaaaaaagctggccatcaaaatgtctgctttattacaataaaagcttatttgaaagcagtgcttagatctacctacagtctaggcatactgctaatattactgtctatgcaaaaactgaaatcccattccgtggaagtctcccctggcaaaggaagagcctgccccaaggtgtttcccatgtggaagatgcgagaatattgctcctaggcagcctgaaatggagaatataagctgctctgatcaggtattgtttcttcttctaaattcacaaaatagacgagtcattctctgcctgtcttcactcgccaggatcagtgattttgaaggtgggggtcagggtgggagtagaggaatatagagagaggcccaaagtcaccttggctaaagtccctctgtgtggaaacatgagaccaggcgcttttatgaggctttcttgaatatgcttatctgtgaaacataatgttttcccctttgtgctcccaggtttgtaggttatatccctcatgcagaactgagagagtggttcagctaccaaataccatctgttagtctgttccagctactgtaaccaaatgccataaactgcatggcttataaataacagaaccttatttctgacagttctagaagctgggaagtccaagatcaaggtgctggcagattctgatgagggtcccctactttctggttcatagatggcactctctcacaagtgtgctcatgtagcagaaggggcacaaggagtatctctgaggcctcttttatgagggcactaattccacctgtgagggctctgccctcatggcctaatcacctcccacagttccccacctcttaccaccagcttaggggattaggatttcaacatatgaacttggaggacacacgaatattctgaccatagcatatacttactggttttttatttctgattttaattggtgcttaaaggaatatctaggtattcctaataactattatccaaaccttccaccaatattttcaataaatgcctggggaacagaaaatgaatgaattaaagtatctaccaataatattttagaaaaaaaacctaaaatttgcaccttcctttttattcacaatatgattttcatatgtaatatttagaattattaccaaaagttgtagcagagcctataaattaaaaaaaaatttcaagggagcatattagaattaagcagtaaaatggtagaaacaaatggcttggtgggataaggagcagtaaacatttttttgcatattctccagttttacaaatttgccatcttcacattttgggggaaaaaagtttgaaagaatgcctttttaaatccattgagaaacatggatagctgatgctgtgcccatactcaaacttcaaaattttctggcccagcaaaaaaaaaacaaaaaaacaaaaaaaaaaaaacctactaaaaaataatagtttattgaagacaagaaaaaaatattactctgccttattcatatgcctgggaatacaatatatttgaaatgtattatttctaaatgaataacaaacttgtaaaccaacacaatcaaatgaattcattttcatactagttatgtgttacagagcaacaaattactccagattgtagtagcctaaagcaagaaactcattatttcacagtgtctgtgggtcaagatttcaggcacagcttagctgagtgcctgtggcctgggtctctcacagtcaagatgcaatcaagatgctgatgtcagtgagggccgcactgatcataaggcccaagagggtaaagatccacttccaaaatcattcaaatgctgctggcaagtctcagctctttgctagtcatcgactgggcacatctgttctttctcatggagcctcgtcatggggctgaccacatggcatcccggttcaccaagagggagagttctgacacagagagaggagacagcgagagagagaatgaatgcacaaaacagaagccacagtcttgtaatagtctaatcatggaaatgacatttcatcacttcaccgtattgtattctttggaagcaagtcactaggtccagcgagtctcagagggaggggattatacaaaggcatgaataccaggagttggggatcctttgggatcaccgtagaagctttcctacatatccttctttcctaccttgtctggataagttctgtctgttcctggagacagctgaagaatttcctcttccaggaagctccctccacacagctgagcctcctcctctctgcttctgcagcagcttgggccccctgtatcagggcatcctgaactgcacaggtgccttgtgagcacctgtctccttgcgtgtctccctcttcgggctcttattcctcaacagccaggttcctgtcttactcaattcccatgcctagttcacagcacagaccgtgtgctatgtacagatgtctcgtatggagctataaattataattgaacataacagaatttcattcacgttacctgcagaaaataaatactgcggtgaatctcactcacttgcccctaatactcctctgcaatatttaagcacggaggtcaaacagtttcctccgtttgggaacttgatatttaatgaaacattttatgagtccgttgacattgcttacctcagctgcagttccacagatgacttcggaatgtgtgaaatagatctcttattcttcactgataaaacttcgggtcagactctcacacaactgcacacatggtagctttgctccactcacaccttgtctacagcctagatgtttgcaaatagtgctttggtttttctttaaaatatccttttgctattactatatatgcccactgctttgttcagttgaaaaatagcgtggctagccgggcatggtggtgcctgcctgtaatcccagctactcgggtggctgaggcaggacaattgcttgaacccgggaggcggaggttgcggtgagccgagatcacaccattgcactccagcctgggcaacaagagtgaaactccatctcaacaacaacaacaaaaaagcgtggctctgttatgccctggcactgtgctaggtccccaacattcacagaagactaaaatataatttctaatgtgggagacaaaggtttataagccaaagagacacaactcatcagctggattttgcactgtgacaagaactgacttagaggagcgtggctgtcttctaattcagggactctggagggatgtgtaactaaggttcaggtcagcacacccaatgcaacatgcatactctgtgcagaaagtaaattgaaaactctgcttgagggtctcagtggacctcaaagcagccctgacattttcttgtaagttagtgcagcataggagttccaattctgcgttcatcctccacagtgagtccccaggagagggaccagagaatggagtaaaaacaaagggaagggagagaaaccacagctctagtggtcacaatgacaccaggaccagtagaagcctgagtcatacaataatttctactggttcagtttctactgaataatttccaccattaaaaatgactccaagcacttacacatgggtgaaacctagaaagtgaaacaattgcttgttatatcttgttagcaggcaaagaaaggatggtgaaatcagctgttggtgaaattctgacagcagggaaagtcgggggctggcatttctggcaggcatgagagccacaaacgggtgacagaatatctcaagagacaatctagccttattcttaatttttgcttaacatatttgttttgacataacattctcatacatctttaagttgagaatcagaaacatgtctttgttataataatattgttgatgtcaaagaaacacagagcatatgctgtcttaggaattctaaatggcaaatgacatgtgtgtctgtataacaaagacaaggagagatagagacaaatataaggagagaaatgcaaaccaactctcaaagtccttaaatcatattataagtgggcaaagacaaggaaagacagaaatagagacaaatataaggaaagcaatgcaaaccaacactccaagcccttaaatcatattctaagtggataaaatgtcacatgtgaaagaagtgagataccagatacttgtgggaactaaaaatggttgggcgtgtccagagcatataaagaatgggcagcagatatagttggatgggtaggcagaagctagtgataaaatattggatatcttaaaccaagtccttgaactttattctggaagattgtgatttaatggatttaatggggctgtacgtcttaacataagaagggaagattatgttaagaagccatacatagggaaaaaataaattctctcggatcaagttacttcagtaaacatatttactaactgtattaatattatgactctttcatattccgatatgttgtttcctaaatttattttccaacagaaactttttcttggggagcatgggtttcaggatctcaaggagccagtagtccaattgttttagaaaatattgttaggctgggtgcagtggctcacatctgtaatcccagcacttcggaaggttgaggcaggcagatcacttgaggtcaggagtttgacaccagcctgtccaacatggtgaaaccccatctgtactaaaatacaaaaattagccaggtgtggtggtgtgtgcctgtaatcccagctactcgagaggctgaggcaggagcattgcttgaacatgggaggaggaggttgaagtgagccgagatcaccccactgcactccagcctgggagacagagtgagactccatctcaaaaaaaaaaaaaaaaaggaaaagaaaatattgttgtggaaaaacattgcaggaatgcttgaatctttggcatttttaaaaaatctaattcacagtgtgactttgggacaaataagttcatttgtttgggctttctcttgtggactaaggaggtagaagaaaattaagcagtttctgggatcccttctggcagtatattctcctagtctatggaaaatatgctataatcagcctgtctggaatatagatatcaagctcgaggtaaagttttactcgtgaggattaaatcagtgagaagtagcatatttaagaaaaaaatatacaatcaacttgagcactctaataatggtttagtgctcattgcttgaaggaataatttttgacaaggtcctgattttaaaggctaatgttcattttttgcctcgaccataagtaagagctagaacctgtagtatataggtcaacagattctaaaatatatttcagtatgtgctcaccaaatcaattagattttttaagtgaaaatgaaaacctctttgagttcagtcctaggctagctggtaaagatggaggaatcatgtgctcatgactagtcctcttccaccggtatgtcaagtattaagagaaagaagaaagacgtttccaaataacttgggatttggggactttggcttaatttgtacttgtatttgtttccttagactataagccacggattaagtttttctgtcattaaggcaccattaactattagaacaggttaacattaaccaatagaacaggtatacctttgatttccatgaattatggaagacaggcatttctttttttttttttttttttttttttttgatggagtctttctctgtcacctgggctggagtgcagtggtgtgatctcggctcactgcaagctccatctcctgggttcacaccattcttctgcctcagcctcccaagtagctgggactacaggtgcccaccaccatgtatggctaattttcttgtatttttagtagagacagggtttcactgtgttagccaggatggtctcgatctcctgaccttgtgatccgcccacctcggcctcccacagtgctgggattacaggcgtgagcaactgtgcccggccaagacaggtatttcttttcatattttataaattagaaaaccaaggtttagaaatcttagagagcatacccaaggtcctaaaaagtgaaaagctgcaaaattggaaatgcagcttaagtcctctcagtatgcgcagcgttatacctcattttctaaaagatagcatttctcaagaaaatgtatacatactgtatgaaagtccctgtaaataatgcaaatgcttgttgaatttttaaaatgtattctgaaactcttgtcaaaataatagttagtttttaccaagtagcatcagtagccacattacatagcagaatttaaattataatggcttgaatcttcttactctttggcacaggtgagaccaggcaggcacactagggaggggcagatgtgagccgtgtaactatctcattcccttaggaagccctttttacaaaagcaaagttggcttctgtcatagttttgattcttctcaagtcagattctgagattaagacccaggctggcctgagactaggagaaggattatttgggaggttatcctggaaagcccaagtgaaggagtggagataataagacaggagagggaggaaagcaaacaaacaaaaaaagtgcattgatagggagaaactgctgctattaattgagctcaatcccactggagagtctctgagaaaccttttggtacgtggggatgctgggacgttattcactgactcctgtcctgtgttggttcagggtggactctaaggatattgactttcacacacttccaggttgcacctatatgtggccaagcaggctccctttgagcccaaggaagtccatgaagagacataagtttctgaggtgggaagctgtttactctaaatagtcaaactcaattgtggctgaactcagaagaatatttaggggagaaaaatacatgaagttctatttcctcattcacagggatcgtggcataaggcagactgcatgggttagggtagtttgggctgccagtaagtgtaacattctctgtgcgaaggccacattggttggttttctaaggatgcaggtgtgtctcatggcacaggaggccagagaagggctcagaaaggctgcagagcatgaacagaaccttactcattctgtctctcacttggtctccctcagtgtgctagctttccctctctcctttacacacaacactcacagacacacatgcacacacatacatgtacacacatgcattcacgcatgtgtgctcacacacagactagctttttctgtttttcttgtacatcttacatgttcctggtttaatcataagacaaatggcctctctcttctggtaacaattttatattcctggtcaagggagctaggttggcccacacatgagagggaacagtggaagtaggatgtgtaatgcccagaagaacaggcatcggaggagagcccaggagttgattctatatgtaaatctgttataataccaatccgaacaagctagtattctatcaaatagccaaatgcagaggtaagcaggaagtaagtaatatcttttgtgattttttaaaatgacacacagtagatgagctcagaacatatacagtacagtagccactgggcaaccattagataaacaagaaaagagccagaccatggggatgaaaccatctttaatcatggcaagtggaataatgtgtaaaaaagttatgctaatcataaaatggaaacgatacatgtccattttagaatcaaatggcacagaaaatatgtgagcatatcagcaccatctatctacattatacccttgagagcttgtagattctgagtttaacagcaccatatcatgaaaaatgacactggacaatttggattgtttttataccatgggtctcagtgagaaagtcagctttctctttcccaatgcaaataaagattagcaaatatatttaatatttatacctgttctggtgattcattttggcttttgaaagtgaactccaccataaaaagataaaaaccaatcttccttttctcattccttccattattcattcatttattgatattactatattataggcactgtgccactctctctgtagaagcgcctgacagtagaaacaagggcttcatcctcctggctatgatcatgaggctacaacataacactgtggctttttgagaattatttcacagcctatttccagagcaaagtaacaatgctgttttttttttggtttctattttcttgtttgtttgtttgtttatgaagtcaaactattatggtgatgttaccaacttctttcaaagcagaggccagggaatcaaggacgttgaggcttaataaaataaaagcaaagtatgtttgtatatttttcatgtgttaggactacaggtttccagaaaataaacctttagtgcataggcaattttatcattagagatttcaaaggggatatgcatttatcgctatcaacagagccggataaaaagatttttttctgactatttccataatgttccattatgtttttaaacatgaaaaatttattccaaaggccaggaaatcacaggactccaccaggtgtgataaggtcccaatctaataaaagtttaactatctctctggctattagtgtttatttattcaagaaaggtccagaatgttattttgaatattcagtgtattatcaataatcgtggggattgtgatgacagtagtggcaatgacaaaaataacatctgtattagtctgttttcacactgctgataaggacatacctgagactgctaagaaaaagaagtttaattggacttatagttccacatgtgtgaggaggcctcagaatcatggtggaaggcaaaaggcactttttttttttttttttgagacagagtcttgctttgctgcccaggctggagtgcagtggcacgatctcagctcaccacaacctccacctcctgggttcaagtgattcatcagccttccaagtagctgggactataggcgtgtgcctccgtgcctggctaatttttgtatttttagtggagatggggtttcactgtgttggccaggctggtctcgaacttctgaccttgtgatctgcctgcctcaggctcccaaagtgctgggattacaggggtgagccaccgcacccagctgaaaggcatttcttacatggcagtggcaagaaaaaatgaagaagaagcaaaagcagaaacccctaatagacccattagatctcatgagacttattgactaccacaaaaatagcacaggaaagactggcaccctggattcagttacctccccctcagtccctcctacaacacatgggaattctgggagatacaattcaagttgagatttgggtgaggacacagtcaaaccatatcattccgccactgactcctccaaatctcatgtcctcacatttcaaaaccaatcatgccttcccaatagtcccccaaagtcttaactcatttcgacattaactcaaaagtccacagtccaaagtctcatctgagacaaggcaagtcctttccacctatgagcctgtaaaatcaaaagcaagctagttgctttctagatacaataggattacaggttttggacaaatacagcggttccaaaggggagaaattggccgaaacaaaggagctacagggaccatgcaagtctgaaatccagtggggcagtcaaattttaaagctccaaaatgatctcctttgaccccagatctgacatccaggtcacgctgatgcaaggggtgggttcccatggtcttgggcaactcctcccctatggctttacagggtacagcctccttcccagatgtttcatgggctggagttgagtgtctgtggcttttccaagttcaaggtgcaagctgtcagtggatctaacattttggggtctggaggatggtggccctcttcttacagctccactaggcagtgccccagttaggactctgtgtggggactccaaccccacatttcccttcctcactgccctagcagaggttctccatgagggccccatccctgcagcaaatttctgccttagcatctaggcgcttccatacatcctctgaaatctaggcagaggttcccaaacctcaattcctgacttctgtgtacctgcaggctcaacaccacatggaatctaccaaggcttagggcttacaccctctgaaaccacagcccaagctgtacattggcccctttcagccatggctggagaggctggtacacaggacaccaagtccctaggctgcacgtagcacggggaacctgggcctggcccatgaaaccactttttcctcatgggcctccaggcctgtgatgggaggggctgctgtgaaggtctttgacatgacctggagacattttccccatggtcttggggataacattaggctccttgctggttatgcaaatttctgcagccggcttgaatttctccccagaaaatgggtttttcttttcttttttttttttttttccgagacaaagtctcactctgtcacccaggctggaatgcagtggtgtgatctcagctcactgcaagcttcaactcctgggttcacgccattctcctgcctcagcctcccgagtagctgggactacaggtgcctgccaccatgtccgactaatttttttgtatttttagtagagacagggtttcaccatgttagccaggatggtctcgatctcctgaccttgtgatctgcccgcctcggcctcccaaagtgctgggattacaggcatgagccaccatgcccggccaggtttttcttttctatcacatagtcaggctgcaaattttccaaacctttatactctgcttcctttctaaaactgaatgcctttaacagtacctaagttacctcttgaatgttttgctgcttagaaatttattccgccagatgccgtaaatcaactctctcaagttcaaagttccacacatctctagggcaggggcaaaatgccaccagtctctttgctaaacataacaaaacttacctttgatcctgttcccaataatttcctcatctccatctgagaccacctcagcctggattttattgttcatgtcactatcagcattttggacaaagccattcaacaagtctctaggaggttccaaactttcccacattttctgatcttctcagccctccaaactgttccagcctctgcctgttacccagttccaaagttgcttcacacattttcgggtatcttttcagcagcgccccactctactgctaccaatttactgtattagtctgttttcatgctgctgatgaagacatacctgacactgggaagaaaaaggaagtttaattggacttacagtttcacatgactgaggaggcctcagaatcatggtggaaggtgaaagacacttcttacgtggcagcagcaagagaaaatgaggaagaagtaaaagcagaaacccctgataaacccatcagatctcatgagacttatttactatcacaagaatagagtgggaaagaccagcccccatgattcaattacctccccctgagttcctcccacaacatgtgggaattctgggagatacaactcaagttgagatttgggcagggacacagccaaaccatatcaatatcttacttttgtattaaataatatgattcctgaagtagttactcatatactgccccatttatttctcataagaactctgggagaaaaaatctatcacctctgttttactgatgagtaaatgtagactgaaagaattcagatgatgtgtaagagaacacatagattataatgacaaagctatagctggaattcagtttctgtttggggatgttgttttgttttattttgatcttagaaaaaactaaaagttatcataaaagactttattctaactgcaaattcaaagataatgtttattcatgcctaggacaaaatttctattaacaatcaaatattacagaaggttgtgaatttttgatgacctgattatgtttacataagtctctaccttttctaaacctcataaatatgaaacctttgggtgaactcttcccagaactgatttccataaacttactgaaaatgagtaggaagaaagagctcaagggacaagtacttattgtgtatactctttagtgatacagaaataaaagaaaagttaaatacctatatttataaaattgaatcttttaaagtcagctgacaggtcaaaatgcaggtaacatttttaagcttcatgcttaaaaaaataagctttatttaaaaaaaaaaaaatacttacttggagccaggcacaatggctcatatgtgtaatcccagctactcaggaggctgaggcaagaggatcacttgagcccaggagatcccatctcaaaaaaaaaaaaagcaccttactttttacttcattgcctcagtgatagcagaccaacagggcattggtaagaatagttttaactatactcacaatcatatactggcttcagttgtactagcaacagttaaaattgaagacacattaagcatgtaataaatgtgaactatcaataagtgaaaccattagaactagtattaaaccgtttcattcttaacatcctttacagataaagaatcagagactgagagagcttaataataccactattcagttagcaagctattctgtggtttaaagagatcagtattgcctttaactttctggcttttagaatttacgcaattctctatcaacatggaggctcaacctgattttggggcattgtgtaagccagtagttttcaacctggagtgattttgacccccaggtgacatttggcaatgcctagagacatttgtgattgtcccatttggttggggttgctatggtatctaatgggagaggccagtaacgctggtgaacatcctacaaagcactgcagagcccctggcaaagaattttccagcccaaaacgtcagtggtgctgaggttgagaaaccttgatatagccctctaagactgaatattaatgaaaatgtttatttaaatcagtttgtatggtcccagtgccacttagaattatatttcttaacaagttagagctcaatttcctctgcccaggcctccttaggatacagaagaataagccagtagtacccttacacggaacaggatagggcaatcatatgattctgaatgccaaggggactttcagattgatggtttcgtaaagtgactgacaccttggacggttcccaagaaaattactaaaacttgagtcttttgcaggtatgcaaaacccatgaatttcataaaaaataaatctttatttcaaagatgggacttttaaagtttaaagtggccttcgggtggagaaagaactaggaatcaaaatttcaatgggcaataaaaacaagtgataatttcctttgattctcacaatcaagatgaagcaggattgtgataagagcttagcatttctatccactcgttgaaatttatcaaatgcctctccctgacttctcgcccttacactgaagtagatatccaaagacttcagatatatacactatggacaagtatttcccctcacttgcagaaattcaagtggcaccagcagtttggagacagaagtctcagtgggcgcaaggaagctggggtctggggcctgactcttccctgccattttggtgccccttcccgcctacccacgccctaccccaatgtgtggcattatccagggggttattaaatattgaaatacagcttgacaaacatctgataacaataggtggccaaggccgggcgcggtggttcatgcctataatcccagcactttgagaggccgaggcggatggatcacctgaggtcaggagtttgagaccagcctggacaacatggtgaaaccccgtctctactaaaaatacaaaattatctgggcctgatggcgggcccctgtaatcccagctactcaggaggctgaggcaggagaattgcttgaacccaggaggcggagcttgcagtgagtcaagatcgcgccactgcactgcagcctgagcgaaagagtgagactctgtctcagaaaaataaaaataaataaataaataaataaaaaggtggccaccagctgtgtcaaaatcaactagttaaaaggtggaaattaaatatgacagtggaaaaagatttctagttggagaatgaaaacttcctaaaatctaagatggctgccattaaatgatattcagattcttcccgggttcttgcttttggatgaataaatggctttttcttcctccaaagttctaatctgatgaatgtgtaatggagataaatgttttggaaatatctccatttgcctggctcctcggtgtctctgtgtaggactttctccccactcaggccaagcttccatctgtgagtggaagatggggaggaggcgaggaccgcgaaggtcacaataagaatgcaaatacagcagtaaaaacagtttaatattcaccctctgtcagcaaaaataggctttcctagtctgcagcaatgtactggaacagacgtaaaagacaggcgttgccaggaaatagggatttactaaattcctttatattcccatttaatatatcaagaggcagtcctggtatccttgatcatatagcatttcccaacaaggaggttagaaccagacaggaagaggagagaaatccacacatactcaccccagtaggggaagaaacaaatctctgaagctctgagcacttacatgactcaccgtggcaggaactaagctacccaagacaacttttaaaattattgcatccacagagtttaccaaatgagtctgaaatttaacatgtttcttttcccagcattttaaaatcaattcctcctttgaaactcctctccaattactcttcatctgtataaattcaaatatattttcattcatttactcattcaacaaatatttattgagcatctatcacgcacagggtgctgcgaatgtgccagtgagtaggtacagataaagtccctgccctcttgaaacttactttttagttggagagaaaaagaaaagtaaatatcatttctggctgtgataaatttcatgaagaaaaacaaacaagaacttcctggtcctcgtgctcactcccttccaacagttttgggggacaccaaagggacagagaggagtcaagccccagaccccagctgccttgtgcccactgggacttctgtctccaaaatgctggtgccacttgagtttttgcgagtgaggggaaatatctgtccatggtgtatgtgtccgaaatctttggacatctacttcagtgggagggagaggagtcctggagagggctcagtacatttcaaggtggtgagagcagtgctaacacgcagcgttctctgacttcctaatgtacctccctctctgccatcagactaaaatttttcaatagctgcttgatgcaatcactttctttttcaagacccgcaactgctcatactgcctgatgctacctcccaggccttgaacatagcttcaaataatgtgtttaacctatgcctggccgtaaagcctcccctctcaccacgccacctcttctaaagtcacataaaaatcccagttctctgtccacacatctaagaatggacactcctctgtcttctcttccctatctttctaaatctgacccttttattaagattcaaccagtttcctgcctgctctattccattcaacacccagaccacagtgatacctcctttgtctaatctttcacaatacactttagcacgttacagattcccaaatgtggaaagaaccatgctggtcttttagtctagcattaaatacaatgtgagtaacacagttataacctttctaataggtagtctcagactttcacactctttcctaatgtttttcaaataagtacatttttaaaaatgcaaatacacagtggtaaattaaattattttgattattaagcattcataatcataaagctatgaataaatctgtatgcttggaactcttatataatcgtaaaagaaaacaaacttaaaaattatattcaaactgaataacaaaattcattcattccaaatgatcaacattaatttaatgtgacatgtaatattttgctaaagtaaagtacctattctcaatgtaaatgtggtattggctactatcaaatgcaatatgtaatagtggggccttacttacctacaaaggccatctctgtcattttttcttaaagaaccttaaaaaaaaaaagttgtagcttcttactaaagaaatctccaatgctaacacaatataagcgtgacttaattacagggtgataatctagatcatgtggacttttcagcccattaaaaattaaaatgaaaaatctaaccattttcaaagaaacgcacatcttttatcatatgccttcatataacaagggtccagaaatccatgttataaaggtttgtactgattcaggtgtttatattttgactctgaaaatggatctatgtaaaatgtgctgacaaaaagggctatttttaagttttgtgcatttttccttatagtacctaaaaatgcatgtagcacatgctggatgttaactaaagattccttgaatatattatctctatttattttatttcttctgatgtgaatttgaaaaaacatttatttacagaccactaaaaatctcccaggaagctgagttagtggtgactgtttgattctaaccttctgaacaaatgttttcatgaactccatgaagctttttaataaacttactcctcacagtgatgcaagtcaaatttaagacagaagaaactaaacgttcatcggtataagaaaatctaagtcaaggtggccaaaaaatcaagcaatcttttaagaatgttgaatcaaatgtggttgttggtgaatgaaaatttcttctattgcagacaattatttgaagggtacatctttttaatactatttccaactgtctcctagagtgatagtagccctgttaaacaattagtaaaacaaacaacaacaaaaaacacattaggccaagtgcagtgactcacgcctgtaattccaactctttggaaggccaaggaggaaggatcacttgaagccaggagttcaagaccagtctgggaaacatagtgagacccccttctacaaaaaaataaaaacttagcccatgaggtggcacgcatctatagtcccaactactcgggaggctgaggcaggaggatcgcttgagcccaggaggtcaaggctgcaatgagctgtgatcatgccactgtactccagcctgggaaacagagtgagattatatatataaaaaaaaatccctcctatctttgaaattttcatagagccacctgtagtttggatgtttcccagggaacacaataaaaacaaattcaataatcctcaactaaaaggcctgatatcatgtttatgccagttttttttcctgagtattttaactttttttctctacttagtttcatcaattaaaggcttattgttaagggagaaaagcattaggacccctagtaagatgctccagggagtgtgttttcagctcaatgtaagaaaaaaatttttgaaccgtcagtactctttgaaactctgtttattccaagatagtgaggtgtctcttaatataacagcttatacaggggctgaatgatgccagctttgggcttaatgttgtttttaggttatctagacagttctgattttagaatgttcataagttaggtctgaattaataagccaataggttcttatttcaaaagaatatatatatacacacatatatatacatatatcaaaaatgtgagctaaattcccatttatctttagtattctccatatctctttcatttccagagtaatggtccttgggaagataatagctagcataatgagacctggtacttacacagcactcaataagtacaagactctctaaatgttcattcctcacaaaactctatgagatacattatagtgctattccccttctacagataatggaactgggacactaaaggttaagtgatgtgctgatacttccaaagctcataaacagaagagtcatccagagccaaactattttggcttcaaagtccaggcacttagacagtgacgctatccactcactagtaccttctggagaagccactaggatagtctgagaatattactggactactaaacaaattgagattcttgaaagctgaattgtgttgtgtttttaccccatcatcacaaacctttacatttgttcagaccaggaaaataaatgtcagatgccaatgtagtgacactatcaactcccaggtgtaatcaagtagagactgagatccctacaccaagtcaaaaacttttatttctttgcatactatggaccatggtgtcaggaataatcacaacccaaagaatcagggaatacagaattttagagctggaagcatttttaggaattgttcattctttctttgttattacagaaatgaggatactgacttctactgagaggatcgtatttcaagaccatgtgatggctttataactgctctttctgactctactgttaactctctcatgtccaggctcataccagccaaaggaaattcgtaataaaatttgatcctctctataattgctattcctgattccactgttaactctctcatgtctaggctgataccagacaaaggaaattagtaataaaatttgatcatctcattctgcttctttacactccttcaaatgttctgcattactttgagacttaatcaaagtccttcagttaaagcatcagttctttgaagacctggtccctgattgtctgcagtctcatcagctcctacttgctcctcttgaaatctggactccagtcactctgagtgtcactccagaccccccagaacatcacactcttacctccatcctttacacatctctttccttctactttcacagcacttcccctggactcttctgtctgcctccacttcatttttcagaatgcagcttaatacctccaaagaaagtcacctctaacccagaggtcacatttgttctgtttagttattcaaactcccaatttaaacaagtctgcctatattgtttcctaacctatgacagatataaagagtaagttatatttctgtgcattaggatacaagaagagcaattagaatttgcacaatgcaacatgacatctccagtaacaatatattgcaaggattcactacttataaaaagggaaacaaggagggcagatcacaaggtcaggagatcgagagcatcctggccaacatggtgaaactccatctctactaaaaatgtaaaaataagctgggcatggtggcacgtgcctgtaatcccagctacttggcaggctgaggcaaaagaatcgcttgaaccggggagttggaggtcgcaatgagccgagatggtgccactgcaatccagcctggtgacagagcaagactctgtctcaaaaaaaaaagaaacaagttaatgaaacaaaattttctgagatcatttggtaaaggtgtcagattggtgcagcgtaatccagtgattgatgtaggtaattttgaaacctgagtcagcaagaaatagcaattatatttaatgtaatatgatgaaggaggcagaaaactgcaataacttagaatgatttccactaaagatacttaaaataaaatgagttttagtgcttatagcaaggaaaactccatttatgtttaacatctacttcttttaaaaatgtatacgatatagggggaagatggtaacagttagaacacccaaattctggtctggtaattgacactaaattagtgagtgactttgagtgagtaagccatatgatatctttgactcttagtataatgcagtggctaggaacaggggctataggctcaaatctcattctattccattactttcaagctccatagccttctgttactttaattgctctaagcctcactttcctcctttgaaaatggaaagaataataccttcctcataggattactgtgacaaacagaaggcacaacacttacaaaacactcagcatagaatatgacacataggaagagctcaaacagctgttgttgttgttgtcgtaatataagtagttacagtgagggagatagatcacatgctctccgaggtcttctcaaattctaaaattctgtggttctatgaacaactcgctcccaaatgatgtcagataaatgagatctcactgtatactgggcaataaaatcaatgtggtcaattttaaatcgtaccctgtaaggtaaggttgagcaggtcatgaattattcaaaactttggttacactcaatatatttctatttgatcatggaatgcatagaactatttaaaagagcatttttaaccttctcatattatgtttaatgattaaaatgagtttgatctttccgtgttcactaagggaaaagaaatggagcaatgctggatagtttatatatgtgccccacttaatcattagcgatttaggtgaaatcatcgagcaactttttgggtaataaaaaatgcaagcaggatatacagttttggcccagataacagacatgcctataaatgagagccagtggcacatcatctccttatgaagctttttcagaatttcaggtagttcaggtccatatgtgctttgaaattctaagggtgagaagatgactatcacgtgtttttccaattatatcttaattttcaaaataggcttattgcagcattgatgtctaattagagttgccggacacagtggctacagtccaatgctataataatctaattaactaaactctccacttatcatgtaagtgcctcctcacctaccacacacttcaccatttaaagtgatatccttttcctttcttcttttttaaatgaagaatttgttcagggagacatttggattgttcagtggtaaaaaaaaaaaagctccaaaaaaaaagcaaataagaaagtaagagtttgtactggacagcagaagtgacatcacctgggcaggcagagcacctgttgaaatccaagacttcatttacggactagctgtgtgactttggcaaattactaaatctccctgagacttagcatctttatttgcaagctgggaataatcggaggaagttaactgagaagctattgggacttaagcttcagggccttttatttgtgtagggcatatatgttcacatagtcatatgcttatgttaagtttacaatgttaagataccttaactgtgactagctaagagctctgtctctttcagtatgactttcttccatcacatggtgaagatctttggagaaaccttgaacaggtttggtgtcatgctaagggaaagttgagatccataaatttgtgtttagtgacaatatttatgtgctctgaagttatttctctatattgtcacatattgctaggcatctagtgtaggaataattttcaagtgcactcccagtgcccatgttcagacctacatatgtatttgtatttaaatatttcaatcttttcttaaagagagattccaaaatgacattaaattcaagctccagaaaacctagattttcctttggggataatgatatgctgagaccagctcagctggggagaccctaacccagcagtgctagaggaattaaagacacacacacagaaatatagaggtgtgaagtgggaaatcaggggtctcacagccttcagagctgagagccccgaacagggatttacccacatatttattaacagcaaaccagtcattagcattgtttctatagatattaaattaactaaaagtatccctcatgggaaacaaagggatgggttgaattaaaggaataggatgggctagttaactgcagcaggaacttatccttaaggcacagatagctcatgctattgtttgtgacttaagaatgcctttaagcggttttctgccctgggcgggctaagtgttccttgccttcattctggtaaacccacaaccttccagcatgggtgttagggccattatgaacatgttacagtgctgcagagattttatttatggccagttttggggccagtttatggccagattttgaggggcctgctcccaaaaatgacacctaccttatactatttctatgaagattaatgtgaaagttttttcctactttcctttgtttgttctgttttgcattctcattcttattctgaacaactctataataaggacatgaagattatctaattcagagtttttatgttttattcccaagcacttctaccccctcaaataaaaccataggcgtgatcttgatgcatgtaataagccagtaattgacagaatttatatgaagcttaaccctcactgtttgggtatatccatctctcatttctgtaaatctccaaagaaccatggcgagcctcaggattccatacgctccatttgaaaacccatgatttaactcaattccctctttttataatggaaactaatttcagagaggctaagtaacctcttgtcttcccattctatgttcaattcaccatatcttttctgtaggtttatgatagcaaacaattgttattatttattagttttaaacacaaagctacctgttttaaacaaaacaatttataaatattcttcatgtcatggaatatttattctagagggattaaatctttaaatataagtgtttccaaactggaagaaaatacagaagactacatgtacaaatgaggctttgaggtaacctattaccaaagccatcagagatctgtaaaaatctgaaacttttgtgtgtaaatgtacaacatataatgttgttctccacatactaaattggcaaattatgtttgcaacagttatggcacatacaaactgctcttagaaatataaattatgcaaagaatgatgactcagaagcccacagaagagcacatttcaatggccccagacttccaaaaaaaaatttcaggctcctggtaatgagagaaatgcaaattaagtagcaatgaagctctcacttcacatccatcagagtggcaaaaaattaaaagtgataataactactgttggtggggatgagttaaaagggtactttcatttatttctggcaaaaatgaaaattgttataggctttcagaaaacaattttgaaatatctattccaataaaaaaaaaatgcaagtcctctttccagggccacagcatgactttcatgggccctagaaacttgtgcctgtgttgtcttctttctctattaatattatatatatatgtgataagatttggctgtgtgcccacccaaatctcatcttgaattgtaactcccataattcccatgtgttgtgggagggacctggtgggagacaattgaatcatgggggcagttcccccatactgttctcgtggtagtgaataagtctcacgagatctgatggttttataaggggtgtccggttttgcttggctctcattctctcttgcctgccaccatgtaagatgtctctttgctcttcctttatctttccccatgattgtgagcctccctagccatgtggaactgtgagtccattaaacctctttcctttataaattactcagtctcgagtttgtctttattagcagcatgagaatgaactgataatacacacacacacatacacgtactcatagacatatatatgtatgtatacatatacagacagaaaatatattttatgattgtgttggtgtaaagaggaatataagtcaaactgaatttattattactggatttactttttcttaaatttttaagataaaaatattccctgaatccctaacatcttgtgggccctgggcacgatgccttttgtgctcaacaatacaagccctaactcctcactcagaaatttgtctactgaaaccagaactttagtgatgtttactttcagcattttggtagtagcaaaaactagacacaaagtgaaaaccttcagtgggcaataattgagtaaatttggttagtatgataccattttagaaaaaaaatgtaagccaacacaactgtgtgtatgtgagttgtctgtgttagttatctattgcaatctaacaagcctccctaaaaattaagtgcttaaaacaacaatcactttatttacccatgattcgaataggttatcagtctgagataggctcttctgaataattctttgctagtcttccatagggtaattcatgcagctgtagtcaaatgacagcttgcctggggctgggcagtctgtgatgtccatgtccttccacacaagtctgatggttagtctgttcctcagctgggccatatgctgccagcaagccagcccagctttcttcacataggtttgaaaagcaacttttaaaacctaaggttgcatcactgatatgatttgactgtgtccccacccaaatctcaccttaaattgtagctcccataattcccacgtgttgtagagggacccagtgggaaataattgaatcatgggagacaatttcccctatactattctcgtggtagtgaataagtctccaagatctgatggttttataaggggtttcccctttcacttgggtctcattctctcttgcctgccgccatgtaagatgtgactttcaccttccgccatgattgtgaagcctccccagccatgtggaacagtgagtcaattaaacctccttcttttataaattacccagtctcaggtatatctttattaacatcatgagaacagactaatcaaatcacatttgctaatgtctctttaatcaaaacaagccatatgatcagacccagaatcatggtgggagggccctgacaagagcacagatgagaggaggtatgattcattaaagaacactactgtaaaattctgtcaatgtgtgcaattgcatatttatgtacacattatcatgttggtatggtaaagatcagcaggaaaaaaagaaaatggaactattaataattttattcagatagagtgaagttacttactgtttaataacagtttatattacttatatattaattcattaaaagctgtttatcaagtgcctactctatgctagatgagtgctgagtatagaacaatcttctggaaaagtgaacatcaagggacatgcccacaactaagaccgtttacttagttattgtaacaccatcttttgaggattaaaaaaagtagatatgtacttgtgcatcataatttcttagcctaggacaaatgctttattacagttaaatactcaatatgatttgtgtgaccccttggagcttgggtgaagccagtgtacagggaaaggagaaaagccaatacaacagtgcattgtcaagttgactgtggtcagttgagtcaggttttcagtcccagggcagctccctgaggaaacctctgaaacacatcgcagatctttctgcccaggagtacacatggatgaaactgattctcatcccctttgttcgagtgactccaagggcattgactttaccagatttttggcatatgcatgcatgaggccacatcaatttctgagactaaccctgctctgcagtatcaatgaaaccctcagggcaagaagcaagaggaacagggcagatgctgtatctgtgattagctaatcaaaacctaggagacattggttaccacagcagtggctgcagtaagaggtggggccaaaaggatataaattagtatacaagaagtgtctgatacagcccaccccttgcagaactgagacttgctcatgtcttctctcaagtctaatctgtcataaagtcatcttcaatctctgcaaagtttcaatacaaaagattggcagaataagtgataatccctgtattacagctgaatccaaggcaataattgatattatttatcctttccttcaactcatcctaagccagtatttcagctggttgcttgactgatgcagtgacccagactttcatctcctggagatctaggtccttagttaccttgctcttcaccagccactaatgctgcggttgcttaatcaccattaacactgagcacagaagcagcaacaggtattacattcaatcccctgggctccagacattcttctccctgcctgctagggggcagcagcgctgtctcctcagctcattcagataagctacctttgccagaacagtagtaactcctttctttgcttgatggtccactggcatgaggagctttgtttttgtttttatttttgtttttttgttttgtctttatttcttctaaacacacacacacacacacacaacaacaacgggatacatgtgcagaacatgcaggtttgttacataggtctacgtgtgccatggtggtttgctgtacctattgacctatcctctaagttccctccctgcaccccacacaccccaacaggccctggtgtgtgttgttcccctctccgtgtccatgtgttctcaatattcaactctcacttatgagtgagaacatgcggtgttgggttttcttttcctgtgttagtttgctaaggatgatggcttccagcttcatctatgtccctgaaaaggacataatctcattcctttttatggctgtgtagtattccatggtgtatagtgccacattttctttatccagtctatcactgatgggcattttggttggttctatgtctttgctattgtaaatagtgctgcagtaaacatgtgtgcatgtgtctttataatagaatgatttataatactttgggtatgtacccagtaatgggactgctgagtcaaatggtgtttctggttctagatccttgaggaattgccacactgtcttccacaagggttgaactaattttcattcctaccaacagtgtgaaagtgttcctatttctccacagcctcaccagcatctattgttttctgactttttaataatcgccattctgactggtgtgagatggtgtctcattgtggtttagatttgcatttctctgacgatcagtgaatttgagctttttttcatatgtttgttgggagcctaaatgtcttcttttgaaaagtgtctgttcatattatttgcccactttttgatggggttgtttgattttttcttataaatatgtttaagttccttgtaaattctggatattagacctttgtcagatgggtagattccaaaaattttctcccattctgtaggttgcctgttcactctgatgatagttccttttgctgtgcagacgctcttcagtttaattagatcccatttgtcaactttggcttttgttgcaattgcttttgacatttttgtcatgaagtctctgcccatgcctatgtcctgaatggtattgcataggttttcttctagggtttttatgattttgggttttaaatttaagtctttagtccatcttgagataattctgtataaggtgtaaggaaggggtccagtttcagttttctgcatatggctagccaattttcccaggaccatttactgaataggagatcgtttccccattgcttgtttttgtcgcatttgtcaaagagcagatgcttgtagatgtatggtgttatttctgaggtctctgttctgttccattggtctatatgtctgtttcggtaccagtacatgctcttttggttactgtagccttgtagtatagtttgaagtcagatagcatgatgcctccacctttgttctttttacttaggattgtcttggctatttggggtcttctttgattccatatgaaattttaaacatttataattctgtgaagaatgtcaatggtagtttgatgggaatagtattgaatctataaattactttgggcagtatggccattttcatgataatgattcttcctctccgtgaggatgaaatgtttttccatttgttgatgtcctgtcttattttcttgagcaatggtttgtagttctccttgaagaggtccttcacgtcccttgtaagttgtattcctaggtttttattctctttgtagtaattgtgagtgggagttcattcatgatttggctctctgcttacctattgttggtgtaaaggaattcttgtgatttttgcacattgattttgtatcctgagattttgctgaagttgcttatcagttcaagatgttttggggctgagatgatggggttttctaaatataaaatcatgtcatctgcaaacagagacaactggacttctaacctgcggagctttaagtgaccaggtcacagccattctttgaagtaaaggggaacccatatacttgacagatatggtaagaccaatgcctcccatggcaaatcctgctgaggtctataaaaagtagtcaccacagcagttctggtataagggatgagtcaagggatttgaagcagtgggctcgatgtgtctgatatagtaatatgtaatctacatagaggagttaattatccacaccatgtcttcttttcttcccccatttcttatcacatacaccctggaatcagagctatttatttaaataacacacgcattatatttgaattatttggttgcacatgctgtataaagcaatacattatttttattagaatgtcaatgatcatataattgtttgataaaaatttttcttttatggaaattttctctgaggggggaatatcacaattttcatagaaggatttagaagttgcactatataatgagaaatgagtactgcagatccttagcaaatatgactttattcttccacttttaacaacataaatgccttggaaaaaatcactcaatttgatcatgattgaaattcccggtggaaaaatatatttgggatttgttaattatttttcagtggggttctcttttttgagagagctgagtgatatggtttgactgtgtccccacccaaatctcaccttaaattgtaataatccccatatgtcaagggcagggccaggtggaaatgattgaatcatggggtggtttccaccatgctgttcttgtggtagtgaataagtctcatgagatctgattgttttataaataggagttcccctgcacaatctctcttgcctgccaccatgtaagatatgcctttgctcttccttcatcttccaccatgattgtgaggcctccccagctatgtggaactgggagtccattaaactatttcctttataaattacccagtctcatatgtctttattagcagcatgagaatggactaaatacactgagcatgagtggaagaaagtctcaaactgaagtgaagaaaaagggaaggggctgatgtggggagaggagcagtccctcagcagcaatgtcaagttcatttgctttgcctctggccactgaggaaagacaatgccaggcaactgtagagctgggccagcaccttctgaaacgatcttgttccccaaataaccacaacagatattatatagcaggtaaactaacaagtaaaggcagaagtgaaaaaaattgttctgtgaaaatatatgtactatatgtacatatagatatagtatatacgtttgtgtgtgtacttaaaccacaatgctgtaagaaatcataaatttatctgaaaatactgggtaaggagatagtatccataaaaaatactattcccatagaatttaaatattcagtgagctttcactgactaacttgcatacaccaggcactgtgctatcaggtatggatgtagcaaaaattatgatatggttcttatgtgcattaaggtaaacattatccagaaatatgtaggctttcttgttttcttaaattagaagacaaacagtataggtttctcctgttagctcaggtatatcattatcaggttcaactattctagcaggtggtaataaattgtttttcttctcatgctgtctgctgtaaataggatcaataaagtcagaataaagatcacaaaaactttcattacagtgcgaatagtttaatgcagcagtttctatgtgcctagattttggcagatgctttaagattctggaatatttgaaaatattattacttctctggtccttgattgtgtaaggaatgctgaagttattgactccttaatctctactgaaggggcttactttgaagactagcaatttcattatttgattctgattctgagatgactttaacagaatctcaagcaatgtaagccacatttagcaatcatagcaatagtctgatatttttgaaacctgtcctattataaaacaagcctacatttatataatcctcatatctcaaaagaagttggagaaagccactgcctgggaagttccttatcctgaacctaaatcagatgctaatatcttgttgctgcattggttttaacagtagactctcaaggatgctaatatcttgttgctgtttcggtttgaaaaaagactctcaacttgtattcatcgatgggtgttctctatttcttaacaggattatctatatttgaatcttcttttaactctgactgaagagctctgaaatcaccaataatgtcttcattactacatcaatacttaaataatggacaagaaattataaaggcttagcaaagacattcagattattatggccttttgaaatatgcaccataaactattaacttagagtgcttggccaaagtaaaacttgaatatcccatcaaattcctcatttttatgagaaaatttatactcagaaaatttaagtggcaaataatccaagtcatatggactgtaagttacagaaccaagtcacaaaaaggagttctgattcttgatctaaaagtcttcccactgtgtccttctatggccttcagttttgggcggtgtattttgtttgttttttatttgagttatatgcgagtttaaacacaattctttctgctatgggaaacggcctgtttcattttcaaattttgaagctcacattttttaatggtttattttttcattaaatttaaaaggctttatttaacaattaaaaatcagtcctattgcctcattcattgaattccataaattacagtaaaacattttaaagctgtaaattagtatacaaacgtagctatctttttattatttgaatcatagaatgactttaaatgactaaagtttgcatttagaattaacactttttaatttaaaaatctgatttttcatttaactgtgatttgtttagctaaaaacaaatggagaatttgaatttctttactccattttactttcctcaacacacacacacacacacacacacacacacacacacagagatataaataagaaaaatctacacttccaagagtcatttccttagtgaatcacatccctcacttttctccacactgtccttcaacaatgagaataaaatacgccttcttcctccataatatcagtagaaacaattcagcacaatgtttaaacaagtgttaggaccctgtagccagaattcctgtgttcaaatcctggctctgcctttttctaggtgagcaatcctagacaagttaactattaaataattgctttgagcagatggcagtgacagagcccttgaagaatagctctctctccaggccagcagaagaaaaatgacagtgcaagacacaggataggacagtcaagaggcaaaaagaaatacaagctaagggcacagaaatgaagagaagaatgtttccatgaggagtcagccaacaatgacaatgtctactaaactcctagagaatgagaacgtagtgaaagcccagggtaggtatcagtgacattcttgaaggtgagacagcagtgataacattctgacttgaggggctaaggtgtaagtggtgaagaagcaggagttcccctagattggacagggaaacgggactagcatgtagcacgtgtctacctgcccttgaatctaagatcgcagagaccagtgcagatgaatagagaagatgcagccaatggaaaaaagagaggaggtaaatggagaaaaccattaaatgatctcaggacaagcatggaatcacatggttctggggaggaagtgtaaggaaagtccttctcttgtcttccttgcaacctcctattcatcctataagacttagcataaaaccacttcacaaataaagtatttccaaactgtcctaaatcaacttatccagtttatttttctaaagtctctgagtactttgttttataatcttttataacatctaacaaattatatatattatttagttaacatgcctgccccatgtattacatagcaaattccccagagctaggatttatgacttttttacttttttcttcctagggcaaggtatagtgttagatactactaccacattagtaggtgttcctaaaataattagcaataagaaaggggctgaggtggtggtttgcgcctgtaatcccagcactttgggagggccaaggtcaggtgtaagagaccagtctggccaacatggtgaaaccctgtctctactaaaagcacaaaaattagccaggcatgctggcgcgtgcctgtaatcccagctaccaaggcaggagaatcgcttgaacccgggaggtggaggtttcagtgagccgagatcgcgtcattgcactccagcctaggcgacgagcaaaactctatctcaaaagaaaagaaaaaaaaggaaatgagagagagaaggttagagatgggaatggagactcaggagatgcagcaacataagcaacctctataggatctgagcaagatgaactggatgctaagcttcttcgtccagacccattaaattgaggaagcgtgtttgtagcatgcctgttggattttgtaggctttctctccttcttagagttttctataacctaatagtaaccctgaataaaatacaagtagagttgtttaggtttagtcatgtaatacaggaaaatttgatatattgtggagtgcaggtcaaagaataccaagaatggatattgaagtctccaggaaatatggcaatcacagtgatacaggggcaaagagtcctggttttgtgactggcattgcaatagtatggattatttttttttttctttgaaacagtgccttgaagccaatttatagagggatttgggaaggatcaaacaaaagaaaaaatgggctgggtatggggaagggagagagtagaaatgaaataataaatgtagatatactctggctttcagaaactttttgaaggacttatcaagtaaaagaactacaagctattgtaatttcaacaagaaattgaaactttgtcttttttaaaaaaatcctaatttcctccctccccttgaggcttggacaggtaaataaacccattagggggctataatgaataacatctcatacagaaattatatgcagggaaagatcatgacacaatattagcatacagaatatctgtttttaaatccacattctctctaccatcttcatttgctgtgtgctgataatgagacaatggttcctaagggaaataatgtagtttactcagggtattcattcaagctctaaaaaaaaaaaatccaaacagacagagaacatatgaggttaatattcaagtgttaatgaggacttaggtattgtgaagcttatattgtactaattaaaaataattgcatggtcctagaattagagagctttcactgaggagggtctcaaggtcattgccgcctctctggatttccaacttggctgtgcacaaacctcagtggttaccttaacaggaataattaggttctgggcaaacacattcctgcaaccaaattcactagagtctgttgagataaaaaagtcagtttcatggtttctaatgagaattacctctttccaatatagaaacttatttttgaaagcaagattaggatcagaaggtggtttcatggttaaaaagggagcagaataaggagggccccagagaccatcctacactgaacaataccaacccagataagccccatataaactatatcgccgctatgcctacgttttacatgaaaaggcttctttatccattcaagggtagaaattcccagaaaaccaatccctcattttagcatcttataacctggtccctacagcaagtatgtacaagtatatagtaagcatgtgatcgcctccagtataaaagagcagaaaggtgagggcattcataagcgattgatggatacgcaaaatgttatattacagcatttcttatcaaaattagatttaaaattatttcatgctttttcccagtttcatatcaaatcattaaaagtgaatatttttccctcttctgtacagtcaggaagactgcttatgatgttccaaagataacctttatgtatgtgctcagctttgacttatgagtaagtttctcacatgggttaatacccggccacttctagtgatcctcatgcttttcaaggtcacaacaggaaggatgtatatttcaagtttaattgtttctctcaaagcacgaggagtagacaggtgtggagagagtcttcctcagctcatcagcgtcatggaactctagctcttctcctagggaatagggcctccttcatgtttctccccctaccctatccattctttaatcgatgctttatttcccagcaattcatgcctgttacttgtctttactcttaaaccttttgcttttctctttctgccagcattttggcaatcctgtataggcctgcggccacgtctgcatgtaagcagagagcagaatttctgctttaacagaatttctctgtcacatcgtctgcttgggccatggtgtttcgtattctactggtagacataaccttcaaggctatgtggacctttaaagtcagtatgaaaatttgacttcattcttccgtctttctttattattctgcttaatataccttgtgttcatccacaacactggaagcacattagttgcttaataaaagttattctttaaatagagtcatcatttttatatagttgtgatattatttccatacattatttatataaaatcatattattttatatagtttttatatatctgtgataaaaataatgctccccaccagaggttcatgtcctaattcatggaaccagtgaatatgtaactttatatggcaaagggactttgtgcttgttaagagccttgatttgaggagattatcctggattatctgggtggctttgtgtaatgacagagctccttaaaatagtcagagaaagagactatgaaagcagagagttgcagtgatgcagcaggagggaaattccacctaattcctagctttgaagatgggggactgagatgatgagcccaggaatgtgtgtggcctctataatctggaaaaggcaagtatatagatttcccccctagaatttgcaggagaaacacagtgctaccaacactttgaatttagcccagtgaaccccatttcaaacttctaaccagaactgtatcattattattaacagaatcatcatctccagaactgtaagataaattggtgttgttttaagtcactaagtgtctgtcatttgttagagcagcaagaggaaactcatacaatagtacttcatcattttccatgataggtaatacacagacaacattcattcattgtttaatgaaaatgaataagacatttagtggctgggcacagtggctcacacctgtaatcccagcactttgggaggctgaggcaggcgggggtcgggaggctgaggcaggcgggggtcaggattttgagaccagcttggccaacatggtgaaaccccatctctactgaaaatacaaaaattagccagacatgttggcaggcacctgtaatcccagctgcttgggaagctaacgcaagaggatcgcttgaacccgggaggcaaagattgcagtgagccgagattgcaccactgcactccagcctgggcaacagagccagactccatctcaaaagaaaaaaaaaagacatttaggacttgtcactgtctaaatttttgcatgctatgaaattcaatctgatatgttcagtagtaatatttctgaatagctgatattatgaatatatagcatgagaacttttacttgggacttggagttgcaacagagaaaaattactttacaaataaatcaatagacttgatgagtctatttattttgccatcaacccaattacctttctgttcttcagcagtctactggcaaaactcaattatcgacaatggttcagacccttctgtttcttcagtggctgctgccttagctcctgtgttctgtcatctcctagggcttaatgtgcaaaaattgtgcaacccagctaggactccactgggtgcagagctaactggctgaggcatgcagggtaaatactgtcattagctcattctctgcataaaaaaatgaaatatactcaataacttctagtttttgaagtatctgattttatttaatcttcacaacaacttggtgaagaaggtattactattaggttgctacaaaagtatttgcagtttttgccatgacttttcatagcaaagccgcaattacttttgcaccaacttaatacctcaattttacagttgaaaaaaccacgttagggagagtatccaggcggtaaatgacagaaaggagatatgatctaaaatttcttaattctttattcagatgataaaactaatgtgactttgctctatcacagctattcttgtcattttactgcagtgtcaaaattctagatacatatttttaaatgtattttaaagacaaaataacataacatatgcacattataaagtgatgtaggaaatttaaaaatctgtgaacagttttaaatcacccacaatattactgctgaaaaataacacctcttactatttttatgtatttataaacatttttctgtgtatttatatatttcttttgacattatggttttgcatcccattccattttatcatatttccagtgaagtgaggtggcattctaaccttatcatatgtacaattttactgtattgtctttcagtaacctacttttgctggatatttaaatataaataaaaattagtctaccttgaatttaccttttttcaggatgaaatctatgcttctccaaatgcagtctgaggacagtagtgccagcgtcatttgggagcttgtcataactgcaaattctctactgagtccaagtctttggggtgaaatccaggaatttctgttttaataagctctccaggtgtttcacacatgcagaattttggactgaagtgtttggttttctgtaagcgttgatgaggcaaagcagcttaggcctattgtaggtgaaaggcaagcacaataattgttatactttgaagaaaaagaaaacttttttccttcgttcgttctttccttccttccttccttccttccttccttccttccttccttcctttcttccttcctttctttgagatggagtcttactctgtcacccaggctggagtgcggtggcacaatcttatctcactgcatccttcgcctcctgggttcaagcgattctcctgccttagcctcctgaatagctgggacaacaggcatgtgccaccatgcccagctaatttttgtatttttagaaaagaccaggtttcaccatgttggccaggatgctcttaatctcttgaccttcagcccacgttggcctcccaaagtgctgggattacaggcgtgagccaccatgcccggcctaatattttttaaaaatgtctgtagagatggggtctcacaatgttgcccaggctggtctccaactcctggctccaagcattcctcccacctaagtctcccaaagtgttgggattacaggcatgagccaccgtgcccggcctaattgttaactctgactgagaacttttgtagattgagaaagtggctggtagtatattgtagataaaggccacaccagaaagggtgagtgtgaggtaagcgagctcctgtggggaatttgcctgaccagagcacaacattcacattggcaagcagctgaagccaagaaagacctgttaggataacccaagttcttgtacacatagatgaagatctgtgatataatttatagatattgaggaaacattacacattatttaacataaaagtgatgtttcataactagaagaacattggttaaaaagcacactttagtgagaagtgaggagatatttgggtagaacaaccaatgaataaggtgagtgttgtaaacaagataccaaatgaaagacaatgataaggagttttggcagaagaaaaagacaatgatttattactaaatattataatggaaaagaaggggaatggtttcaatggcagattggacaaagggactaagaggaaaactagaatttgaacctgacatcctggtttctcttgagctatacataccaattttaataatctggagagaggtgtaaaaaattaacaaaacagttttattttcaaagattgtgagtttagtttactcttaactcctctgtattcctaatcacctacatccagttggattctatgtcttgccgatcttaaaaaaaaaaaaaaaacatttgaggccaggtgcagtggctcacgcctataatcccagcactttgagaggccgaggcgcagatcacctgaggtcgggaattcgagaccagcctgaccaacatggagaaaccccgtctccactaaaaatactaaattagccgggcatggtggcggatgcctgtaatcccagctacttgggaggctgaggcaggagaatcgcttgaatctgggaggcagaagttgtggtgagccgagatcgcgccattgcattccagcctgggcaacaagaacgaaactccgtctcaaaaaaaaaaaaaaaaaaaaaaattgaatcagtcctatttactctattctttgtcatattgctttagtttaagtactggtaatctttcaactggcagcctatagttgaaacagcctaaatactctttttaccttttgaattacttccctaaaacctattgcattgctgcacagagttttcattctgtataagttgatataaaacctatattgacttatggcatcttcctgctaaaagtttaaaaatacttttcctctgctttttattgtactgttttacttggtatgacattctgaattagagcagccgtgtagtttatcatctgaatgagacccttgggacattgaaagtgggcatattaataattacactgggacaaaagttgtctgggctttgccgagctttctagccccatcctcttctaagagcagtttacaaatgagcaataccaaaataattagtgaacaaacacggtttcgaaggtcttctatccgtgttgttcacagctgtatctgcaatgcctaacgcactgctcagtgcagcatagttcctcaataactatgtgcaaagggaggaaatgagggagggaggcatggaagaagaaatgggtagatcaaagaattttagaaagcttgaatctagtatgctgttgtttaaatgacatagagttgaaggtctaacatccttggaaagaggaaggcatagaaagccaaaggaggcacagagaacttggtagaggaaggttaaaaaagggaggtcccagaatcagaccacccatgaaactgactttctgattccaaccaggctctagtgaatttgactggagaaacaagtttttccagaacctaattattcctgttagagtaactactgaggtttgtgcatagccaggctggaaatccagagaggtggcaatgaccttgagaccctcctcagtgaaagctctctaattctaggaccatgcaattatttttaattagtacaatataagcttaacaatgttttgtaatttattttgtactattttatagtttaacacacaacaacccctaaggagtgtaattcaagtgcaacttacccaaagacttcactgcttttgtatcaggttgacatatttttaccgaaaacatatcttagttttgtgaagaaaactttcacattcttcattaattcctgggcagagctgtttaaaagaaagttttgtcagtagcattttagatgttctaactacaaaggagatatgtaaatgtccgttttgtacttctgaaaacaggtgcagtctcagtgagaaaaagaaaatttgtcatgagcactggaataaaaagggaaataatgaataagaacataatttaattacatgaatgtcagccgtctacacaaactagatttgatgtaattaaagcacctggaacaaataaaatgaatcaaggaaatctctttcctttttttgagaaaggaagattcaaaattacatactatttatggacaacttgtacaaactatgcaaaaaataagtgtgcatgtgagtgtatgtgtgtgtgtgcacaagagagaggcagagagagtgaagggtaatttttcctggcctcttagttcataaccaacaaagcagccaatataagttttttatagtaaggggataatatctataaataagtagaaattaaatattgttttcaatgatcatgagccccagtaaaataaaaattacatttatttaaggattgattattttagtcttttccccaacataaagtcataccaggagcttgctgtctttggtaggtcaggaatgcttatagagaaagaaacaaatcatgaatttaaatttagagacaaagaacgctctttccaggaagaactactcctaactagtggtttgctagcattgcaatatgccactgggacatttatctggggagccatttgttctgtgctgtgcttatgtaggatattttgtttgttctagctatctacgagccttcctgtgaagcctacaaacacctaggacagacatcaaattattactggatagatcctgatggcagcggacctctggggcctctgaaagtttactgcaacatgacaggtaactgtgtcatatttatgttttatgaagatgcttttctatatgtcacgaataagtagttccaccaatggtttgtttctttggtgctatgtttttatcacaacatctaatcagcaacatattgctggatttgttagataagatgatgaaatgtattattagagcaataaaacattttgacactgtgcttttcaaaaagttcatgtttgatgtgaacaattaagcatcatttttttaaaatcagcatgtagggggaaaaaaacagaaagtaaagttgcaaagttcagcccaaagaaagaactagtaacctagattagggaaatttagcatcactgctccaatattctcactgtgcatgctagaggaagcttttagatcgtgacagaccttcctcgattctccataatgatagaagaaatctttctaagtcctgaaatcccattctgataatagcaaaaattacctgaagcttttatgaaatatatttgggcttttcttcttgggaagaggacctagtttttctccacttccatgtgaaatgagattatgggttcttgtcaacttccacaacaatgtgtaaaatgtgcagatctctaagataagaacagattttccatcagacacttggcaatatcttacgcttcaaaaatccagaggaaggtgtgaggtatgcattatttactggctccagcaaaagaccagcatttgatgtgaactcctgggcataatatgataagggtaatgataataagatgctactgatggtagttactgagtgtgactgtttaccatctgtcaagtatcatgacaaatcctttggacagacacttgagtttacatcctggcttcattaatcaccacatgtgtaatattgggcactttagtaactttgctaaattcagtaaacctcagaatctttatctgtaaatgaattaatgagaatacccacctcatagcattattgtatgaatacaataaggtaatctgcatatggttcttagcttattgtctaacacacggtaaaccttcaataaaagttattggatgaaaaaatttaaaggctttagtagttaaataacttgcccatattagaccaggtgtggtggttcacgcctgtaatcccagcatcttgggagactgaggtaggtggatcatgaggtcaagaggtcgagaccattctggccaacatgaggaaaccctgtctctactaaaaatccaaaaattagctgggcttcgtggcacacacatgtagtcccagctactcaggaggctaaggcaggagaatcacttgatccctggaggaggaggttgtagtgagccgagatcaagccactgcactccagcttggtgacagagcaagactccatctcaataaataaataaataaataaataaataaaacttgcccatattattcaggcaaattcaaactgaattatatgcagcccatggatcttctggctatagttcagaaccacttatagagttttattttgtctttggttttgttttctatacaaacttcttggctccacccctgcagactctgattcattatgtgtgaagtggaaatcagattgtaaaactagaactgaaaaccatgaatggtactctaggcaagcagacaccagcgaggaactctcagcagtatcaggaagccaggcatggtacagaatgaaagggaaaatgatgagggcatcagtgtagtatggaagacatgtggagaagataataaaatggaagctgaccagcctgggcaacatagtgagaccacatctctatttagaaaatgtcccagctacttgggtggctcatgtggaaggattccttgagccccggaggttcgaggctgcagtgagttgtgatcacactactgcactccagtctaaaagagtgagacctgtctcaatttttttttcaaaatagaaataaaaaaataaaatgggaactagcgtccccctaaatttctaaatttcccctagaaatatgcaagatgctagctcccagtttaatttttttttctattttgaaaaagaactttaggcatgtctcagagaaggaacacacttaccagagagattaatctaagagttcactgacagctggacttgtcaatgcacttgaattcttttttatataccttcatttttatctttttagcactaaaatattaacctatgataacttgacttaatttataagaatctcgattctggtttctcctaatatatgaaaatatataatacaattaaagtctattcttaacctcaagggaaatcagggcatcgtggcttggactggacaattaagaatttattttagttattttcttaaattcatctcaaaggaaattagaaaagaaaacaaaactataatatacataattctcatatcaaggacacacacaacacacaggactagtctactctcaggagagcttctcctgtgcattgaaccctttgctcagaaacatatgtcttatcttcatcaatatctcccttaaacagcatggctgcaatttaactcagcacttcaaatgacttctgagctctaaggagcagaatacaactttttgcaagtagaattttttttctattcattcaagatagttacaaacatcagtgtgttcaaggacccttgaagaatcttgccttacaggccagcaggcacctttcagttctttgccactaaccaacccttccttttcctggaaagaatgtggatttaacatcataaagagagcatgatgccacaaagcttggcttgggctattccattttcaagagatacatgttaaagaagaggagggagtaacagcatgaagtagtctataaagtcttgatatgtaactctatgtcatgaaaaattataaatgctcccctaaatccgaagtataaaaggaggcaagcactcaaaaaggtgaagaagagaaatgagccatataaatcaatcccccagggcacaagagagattggcttattccaaagaactgaaatcccagtggctggaacatagtgagcgtaagagagtgactcaaaataaagcaggggaaaggtgggtgggggcaggccagagcagaccagccataaggagtgtagggcagaaaaaagtgcgcttttttttattattatttttcaattgcagtgggtggtcgtctatggaaagattttaagcaggaaaataagatcttgattgcattcatacatctaccacttgggcttctataagagacagcatgaaaacattgggaccagctctgaagctattattgcaaaagtccaatgaagagatgatgctcccttgaactagggtagggatggtttaaagtgatgagaaattgatacatttttagatctgttttgaaggtagaattgacaggattggtaaaagtttggatgagaatgtttaaagagagacagttatcaatactaacttctcaacatatggactgagtagctggatgaactttagtgccatttaggagaagtggacaattaagggtaaaacagttttaaaggaagctcaagaacttacttttgacctaattaaatgtgaagtgccatgtgccatctaaactgagatgcaaattttacagttgggtgagccccaaaagcctgattgggttagagatataaatgtgccaattattagcatattaatatatgagaattgataatatcatttgggggttgatgtaacagagaaacagcatctcaggaatgagctcttagaaactcaataggcgggacacgatgactcacgcctgtaatcccagcactttgggaggccaagacaggtggatcgcttgagcccaggagttcaagaccagccttggcaacatggtgagaccctatctctaccaaaaaaaaaaaaaaagcaaaaacaaaaactagctgggcatggtggtgcaaacctgtggtcccagctacttaggaggctgaggtgggaggatcacttgagcctgggatgtcaaggctgcaatgagccatgatcacactactgaattccagcctgagtgccagaaaccctgccaagaagaagaaggaggaggagtaagaggaggaggaggggtagagggagggggaggggaaaggaagggggagggggaaggggagaaggggggtggggggatgaggaattagtccgttctcacgctgctataaagaacttccctgagttcgttctcacactgctatgaagaacttccctgagattgagtaatttataaaggaaagaggtttaattgactcacagttgctcatggctggggaagcctctggaaatttacaatcatggcagaaggggaagcagatgccttcttcacaaggcggcaggagagagcatgtgaaggcagaattgtcaaacacttataaaaccattagatctcatgagaactcactattatgagaagtacatggaggaaactgtccccataatccaatcacctctcaccaggtccttccctcaacacttgggaattgtggggattacaattcaagatgagattcggacagggattcagagccaaactatattactcaataattcaatagagagagattagggttctcgtgttaaaatatttaataagtgtttggaaaaatatacataattgagggtaagtagagaaaaagtgtctgagagcatttggggggcaaacagatcatctgtgtggaggttaaaatgactgcttggatcctagagaatgacagaaagacttggagaatgaagagcaacttggcatccatgcacacatatacagtggatgtggtggtgccacagacgtatggcaaataatagccactagaatgcggggaacatggtatggccaggaataatgaaccttctaaggatgctgcatagacagcataggggagccatggattgagctacatcctaggcaattagggggtgttctaaatgacagagcatttcaagcactgcataggacaccagcaaaatcttccccaaaacggctgactcatgagctgagtgttgaagaacaagtgggtgttatgcggctgagaaatcaggagaaggaaaaataggtcaacttacaaaatgctttgtgtaggatgcaaagcagttgaaagtttgtcctgaggtgaaagcaagcaatggatggtttcaagcaaaagagtaatttaatcaggcattgtatattaaaaacatcactttgacagctgtgaataatattctccaaaggacacccagagataagacagggaaacaagttcgaaagcccccgtagtaatgcagaggttgaaaatggagacttaaagtagtggcaataaagtaaaagaggaggagattgatttgatgggtatttaagaagaggagttggccagaccgttcctgatgagacagagaaagttgaaaatggtaaccacatgacatggagcacagaggagcagaggaaaactaggaaaagggtaagattctatgttgctttgggtccctgtaattcaaccaggtaaagttgtcctacaggcagatgctacgcaaagtcactgtaggaccttgaacacattaaaaaaaaaatctttggccgggcacggcggctcatgcctgtaatcccagcactttgggaggccaaggtgggtggatcacctgaggtcaggagttggagaccagcctgaccaacatggcgaaaccccgtctctactaaaaatacaaaaattaactgggtgtggtggcgcacacctgtagtcccagctacacaggaggctgagacaggagagtcacttgaacccggggggcagaggttccagtgagccgagattgtgccactgcactgcagcctgggcaacacagcgagactccgtctcaaaaaataaataaatataaaataaaaaaatctttgtctcgggtttcttgtaaataaagttcagtaattggaataagttgatatcttcactgcctttccttcaaaaaaaaaaaggaaaatatttccattgttaccatgagacatgaaaaaaatcactgcttgcagtcaaataatttagacagaggcttcttatctcaaacaagcttgaatttactatttcttgctaagtttgacataaattgactcttcattttttatcgtaaggcagtagttctactatgtaattcttctgactgtctgcagctcagagctacatctcttggaaatttagaaattagggggtgtcctaaattatagagcatttcaagtgctgcacagttgatgacattgaggagagaagatttttcacagaatcctttgtagaaaaatttatcatcctgtgaaagccaaagcctggtttctttttttagatcttagggtacatgataaaatgtgatcattgttagcctcgccttccttctccatttttatgctccctctgaaaatttggtgttaaaacttttgtgaatataaactatcttatattttcagtatcaacctcttttaattgtatatttctaacatttcagcttttcatttccattttcttcaggtgttaccagcatcctctccctagataccctgaacctttgtatttaaaaggttctttctgctttcacttagttctttctgctagatgattaatagtaacaatagtaaataatgctcgatccagccattattcttgaaactttactgtctatccttaaacctaagacaatatttttcttcatcttctatcctctaactcattttctccataactccctttgcattcatttttttcttaatttaagcaagcatctgtgctctagtgcgtgaagtttaaagtccaaataaagtactcctcttgcattcttcctagccctggttttgtagttttatcaaaaagccattaagcttgtttacataatttgtgctttataaagccccaggatttagctgatcaaattctattatcctctctaatagtgaaagctgttcgtgtctttttaatctaatatttatagagagcttgtaacggaagtttctaagcgcttgcactcagtattagtatcgtatttagtattatgtttctcacaagttttacaagtacagtgtgggcaggaggaaatgggtcactgaggtggtggacttgggctccagtggagagtatcataaacccacccacctccacctccccctccccgtgtccacaaagcaaaacagtttctatcctatagtacagtcatgcaccacatagtatttcagtcaacaacagactacatctagaatggtggtcctataagattataatggtgtatgtttactgcaccttttctatgtgtagataggttatatacacagacaccattctgttacaattgtccacagtattcagtacagtaatatgctgtacaggtttgtagcctaggagcaataggctttaccgtacagcccaggtgtgtaatgggttatgccactgagatttgtgtaagtacactctatgaggtttacacaatgaccaaatcacctaatgacacatttctcagaacctatgcctgttattaagtgacacatgactgtactattttccttagcagtttacagtaatacaaatttagtatccacagtttctgtgtgtcaaggcacaggtgacctgggtcaactgctcagagtcttgccaggctgagaccaaggtgtcacccagggcttgggttttaccagagacttgggatcttcttggaagtttattcaagtgttgatagattcatttccttatggtttaaagactgacgtctcctattcttattgtctattggccccagattgctctcagctcccagaagctgctcccagctccctgccttgtggctctgcctgtccaggaggagctctctgactcgctttccagcgctgacctgacttggtcgtcactcaggataattacccatttgattaactcaaacccaccagtttacagcccttaattacacctgcaaaatctcttcatcttttccatgtaaagaagcccggtcccattagtgacaccccatcatatttgatggccccacccccagtctaggagagggtattatgcctggtgtacccaccaggtggctagaatcttgaagaccattttagaattctgtttagcatgcttacctatgtgcctctgtaaattattcataattccagcaacctttatttctaccttttgagtaacaacagtgccatatttagattataaaatcttaggctttactgttaatgctcttataattgtaacatattgttctgtaaaaactttgacaataaagataagcaaaaataaaaattgcttgtcaaccagaaatgacaattactaacacattagtcactgtgcaataaagattgtatattttatacaggtacctgcatacataattgagggcaaactaaatgccaggcacatttttaaaatatcacatgcattaactcatccaataactcatgacgacctcacaaggtgggtaatactattgttctcccattttttgatgatgaaactagagctcagagaacttaagtactgggccacacatgtagtaaataataaagcttgacttttcagccaggcttgtgtgttcagagctggtttgtagttaccgtgtgtatgtgtatgtgcacacacaagttcacacatatataggaacagcactcctcattttagattctgtagtacgatttgcaatatgattgctgaaatgagcattttttattcaaatctcttcattatcattgaaactttcttacacagctctgattcattatctgtggtttggacagcatttttgttataaacaatttacttcttaattatctaactaatgccttggggtttttaatcagaggacacattttaaatgaaatcgatatataaaccattataggcaattagtatgatttttagttcttttttttattattattatactttaagttttagggtacatgtgcacaatgtgcaggttagttacatatgtatacatgtgccatgttggtgtgctgcacccattaactcctcatttagcattaggtatatctcctaatgctatccctcccccctccccccaccccacaacagtccccagaagtgtgatgttccccttcctgtgtccatgtgttctcattgttcaattcccatctgatgagttcatttttaattcttaattcaactacaagtattttctctaatataattttctaagagctttacataatttgtatatttcctgtctacctaggtttatcatcccttaaggtttgagcccagctttcagaataacttaaactctatccccaacatctagttaatttttcaatgtaaagtcttaaactgaatctaacaaaatcttgtttgaatatgcaacaggattgaatggaattgtactggatatcatcggtaacaatgatcgtagtgtctcattcttccccttttagagaggaaatcatgtagaaatgaggacacacagagctctcctattctatattagggcttattaacattcataagttgggcgctactaagcttctaaccccttcattttcctttatatcataactatttctctgatgtgtatactggcttcctccattatattccctctactcatttttatttctttctcatcaaagccattttctctcctctttctgtctcctaacctagtttacctcctctatggttaacccactcagagaatagctgtcctttatgtcttctttcagacacatcttctcctctttgtcgacctctcacaggctgtctttgttataaacctttgtaatcactcagcaagtcctgcttcacgcattcagctatttcagttcttcacaatcagtataaatctttgaattcaattctgctcatacagcttcaattgaaaatctcggaaccaactcactgatcaaacacagcctgtaaagaactcttctccgtaacggattacccactcccaaagactcccttctggattcagcctcattccagagcttctgcctgccaggctttctttgcaatctcatcttcattgtgtgtcagccatagtgataggttaatactatagaagttctcaaatggttttcaaacttcaaattaaaaaaaaaaaagagaggaaaaccatgagatccagtgaggcctacaccacaggagaggacccagaaagggggtacaagaccccaggtgaaatcaagatgaagtggctttaggtatatcacaggtcactcagcccttctgaggtttccaaaatcgtactctctatgcaaatgctcttccttcaaatgttttcatgtaacctgacaaaacaatatcttatagacactgcttgattttgtgcttttaaaagcactgcctttcttatgcaatttctctgctcaaaatccgagaaagacttcacagtgtggatggctagggactgttgtttgattacctctggcacttggaatctgaaactcttgcctagtctacagtaatcaactattcaaacaggatgggaaacacacacacacacacacacacacacacacacatgttgggaaattcaattaagatcaactcatttctttgcaatcaaaaatcaaaaaccacaggaataatctcatacttttttttaactaggaatttctctcttccggctaaacttaaagccaataataactgtttctgtttctccaaactttaggtttttccaatttgtggatcaccttttatttcttctgaggatgtcaagtttcatatcagaatgtccctggaaattttagaaagaaaatctcatatagcagctaatctctctttttatcttgtgtctttgtccaatcaccacaaccaagaaagttaaatagtaaattgcaccaatattatatgttgcccaaactggaaaatatttaaagttttatttcctggacctgacttaaactagaggccctaaaacttttcagtgccccacataaatgattgctgcataaaagtacttgtctcattaatgaagaatgaaaatacaactttgggaaaaaatatccctgtggatgaagttgtcaaaaaatctgtttgctgcatttacgtacagacaatttcattagcattgaactcttcacataattattaatctcatgttcggtttttactcagatttctgaacaaaatcagcattaaaaagtgagattaggcaaaaacttgctgtatcattcacttcatcatcattactgttgttattcatgttttgcttttatgtgcatccatgttattctatcttcactggacccctatttgtccttctgtttctaagctcacttggtgtagctctaggtttcagggctaggacaaggcagcataattttgagagatgaaatgaatgcctttgctgctccaggcagcagggcatggaggacagagcgggaagtttgttagtacattgtagaatctgatatctttttgctctcaggttttaaaagactataaaataatattgagcatcttgctgacatttcactttgttctaacatgaagtgtttgctctctatatctggggtataccatcatcatggacttcatcttcaccatgtctgtgtttatttatccaagaatgtcttcatcccccctatattggaatgcatgatttttatataatgtcttcttcattttaattttaccctctaatgtggatatagcacatcccctggtagcttcttgatcctttagtacaacctacttcttctctgaaagttagaagaatcttgtttttgttccagatgttctgaaatttcaaaacaacgtgacttggaataggtcagttttcatgtatttgctgggtgttcactttaacattggcaactcatgttcttacatttctttttatttatctgtttgtgattctgtctcttatgatttatctattgtctctttctagaatgcttttcattgtggttttaaatcagagttcttttttcttcttgaaaatttccttttctaatggcgttctattactgctttatgaatgcaataccttttttgtatcccaaggataataaaacatctttttttcccttctttcttagttttctccaagttacttgattctgttcatttttttctgaccttcacagctttcctcatattcgtgattattattagctgtgtgtttattattacgagtgggagggtcttgttgacttggagctttactgtgggttagagtaacaattatgtcctggcttgctcagtacagtcccattttactcccattgccctgatgtccttgtgaatagctcttccttttattctcagtagtgtccttgtttggatgataaattatttgatcacctcactgcagaggaagctgagtgttcccgttttaggactctctcatctgttgtcagcattatttttttcattttctctttattagtcaggttctctaaggatacgttttaaaattctttcctggaggtttctgatctggttgccaacaatcttggaaccatttggggaaagaggtctaacagcatgaacattcagtatttggtacaagtgtaggcaatctccattttctgtgtagtttccacattctttgtaatacttggttcttctcaatgcagggattcttttagaaaataaacctccagttatctcccagagtgagagaggagtagtcaatcagccacaaggcttaggagacctagggatctactatctgtcaaacagccttaatgcagttctccttactttattaattactgaatcttttatggattcatggtcgaaagttgggttggttctcatctttccagactttcaagttaagattcagcattctactaagtcagtgagcacatattcatttactttccatcctccaaaattgtattgctagtattgattcatattctcccggtctttgtgggaaatgtgtgtgtgtgtgtgtgtgtgtgtgtgtgtgtgtgtgtgtgtgtattccctagctttaggagtatgcatatgtgtatgtgtgtgtgtgtgtgtgtattccctagctttaggagtatgcatatgtgtgtgtttgtgtgtgtgtgtgtgtattccctagctttaggagtacgcatatgtgtgtgtgtattccctagctttaggggtatatatatgtgtgtgtgtgtgtgtgtgagagactgtgtgtgtattccctagctttaggggtgtgtgtgtgtgtgtgtgtgtgtgtgtgtgtgtattccctagctttaggggtatatgtgtgtgtgtgagtgtgtgtattccctagctttaggggtgtatatatgtgtgtgtgtattccctagctttaggggtatacaactgtgtgtgtgtgtgtgtgtgtgtgtatgtgtgtgtgaattccctagctttaggggatttagaaggcatataagttaattgtcagtgtgccagtgtttactcaccatcctaaccaaggtgcagcttctttatttttaattctgtaatttaatgtcataaaaccaaatagttcaaatacatgtttcaaaacacgtattttaaaatgtatgaaaatctccaaattttaatgtaaattaataaattttcctttttggttaaggagtgtcataattcttaaagtgtttattattgattatctgctgtatgagaggtaatatgataaattctttcatctattgtgtttcatttattcttcacaataaccctgagaagtattagggtcccaattttgagatatggaaactgaaacacaaacagatattaacattctctgtaacacaatttacaaaaggctgtttacacaaagaatatagatttggatgacatcctgtatcatttagtggcataagtgtgtcactttcactttttaataggttgaaacattcgaagaaaccctcagttcttataataatataaattactattattattatttgaaaatttttttcttctctctatgatttctggttaactggattctagactgatcaagggccatgtctgtcttgtttactactgaacccagcagagtgtctggtatatgtcagcactactactgctgtgaatagacctcaccactgtgtctttttcagtagagctaagtagccaccaccaatctcagtgctaaataagaaaacaagtttgagataggtaagagtgtgcatcacttataattagaagacatgcgtttattagcaatatgctaaaaaaatcattcccacaatctgtcctataaacttgaaaaagtccaagtgctctatccttttaggtgctccaacttgtccttgtatggctgtttttacagtaaatatgaaaatattctagaagcaggattgagtttgccttatactgggatcaggtaactagagtcctctaatttaatgactgaaaaagatctatttaagaatcaggcctcagtcagcattatgaaaagtaaaaggtaaagagttcactagattctttcatcattttgatgcaagagtgaagagttactaaaatgttttagctaagcaacataggtgaacatcagtaatttcttccaccagtgaaaagtcaacttccataatgcaactaacaattaaatttatgtaacaaaatagcaggttttgagctatgataaatgcaacttatacgtttggggtagtatctacctctaaaatctgttcttttaatgaaatgctagccaacccccctatgaagtgtgggttttgttctcgcttagggtgactgaccagccttacaccaacccttggatatagagccatattgtctaatacacatgcaattatatctaaccatccttgggatgtattttaaaagtaaattacaaaccacatagcctatgagttgactatccaggtagttttaccaactgtttataaaagaaactatgtcaacataaagcagtcagtttggaaaacacgtgcaagagatggttactttcacgtgaccagcatgttgcttagttgtaacatgctataaagggttgtgttttactaacagtgtcactgatgatcctcggttcattcatcatacttctgcgtcactgctgctacttactaactacaatcccaggccagcttaagcattagttttctttacattttgctttgctcattgcttctttaatatatccttattaccatagtcttccctctgtgttctccagtagatagaagaagaggatttgacatgacgctaagcacattaatataatagtttcttctcccagtggtatttgcatttcaaagagaataacaacaagatgaaccaaaatatggaagcaatattttcagacaggataccttccattgctctctaaatcactcctatctgtagcccccattctacttgtgtatacaaaggcttgtagcccatgtaacgtttaaagtctctcccatgtagagtttcttctattggggtggcaggagggggctgaaatggcaagccactatttctattaactgctctgtcttttgcttcaatatctgtttcataacaagttttttttttctcaatagctaccccattttataggcaaaggctcagaggaaaatgagatcagagaaaaaaaatgagttaaatatcatctgcaaacaaatataaagcaacacaccatgcaagaaaggctcaccccctctggatagagaattctctcttggtatcgtgttggtgtcattgttctcaccacctctactctcctcaagtttatcttttctttgggagttccagattctatttattaagtatccagtatttccatacacagtattcatttttaatattgaaatcctaatctccattcctattgatatttgatagcaaaatgttccaacttctatacaacatttgagtacttccttcattgtggccgctttagaatctatctgtatgtaactatgggtaggcaaggaccaaacttgctcagaaagtttcatagatgctgcggttttatcattacattgcctatctgcatggtgatttttttaatcagttattataagcatgtttgatacttttgattgataatggaaagtaaaggaatgaaagttcagctaattaaaagagatgattagaaagaagttggctttgcaggagattggttgataaaacaactgatattttctttttcttgtttcaagccttgggcagaactcttatgaaagcatttagaatttagagggcttgtcatggccacactaagcatctgactcatctggttgctgcaatgtcattaaaatgaatttttggtgccggttcaatttgtctttggctctacagacatgaccttattcacattgattgctctcccattaacggtagtgtagtaaaggaaacgaaataagaatatagtgttcaaaagcaggtctacatgcaaagggtttctttaacagtattattatatcatgatgttttcagagatgtgaagtatatttattaagtatattcctagattataagaatgttgctttaaatgatatattaattttctaccatagtggaaaattatttagtatacagtataaatcattcctaaaataaaaaattatgggatttatataagcatgtcaatatcaacttttcatttagaaaactacaaaagaaaccatttatttaaacactttaaaaccctgtgtattacgaaattaaagtatcattttcaacagagatacaacttttccgtcttttgccttctctaagcttagaaaactcacaaagtttatgaactttaaatcaaaatcaatgtttcttagtttctcatcaatattattttaaaatattgaatatctttaataaatatggagaaaaaattaattcagaaatattcttgcaaattggtctcttttaacataatctttaagtcattgcttacacttcccagtcactttagtaaattcttaattgacgtggttccaaatctcttcctaattctggtcattatgttcttttttaaatgtaatgaactgtgtggtgtgattaacagcaagcttcatgccaagtacaatacagtggggttttatcagatagcagagagagggtgtgaatcgtttcccagacttatgaaatatctatgtttatcattctttgttatctcccaggtacagtttttagaattttaatgtgtttaaataagcttgcataattgttaatgtatttacttaaccaatatttatgagtgcatcttatgtttcaggcataggtacacagtgacaaacacacataaaatctgattgtgtggaacttataatgttataagtatgtataaaattatttcaaataatctgttataatatgccagtgatacagttgttgctgtcagagacattgaattattgaaaaatgagaaaagtttacattattaatatgccatttatagccaatttctgatagatagttaattaccttaagaaagcaattctcaaactttagtgatttgtgcattgtcttcagaagtttcaccaagccccagaccacctatttaattatttaataaatatgtttttaatggactccctttttaaaatcttattctcattctaagcaacaatttccatgaaaggttgtgtttagttcacttgacattgcttcctactgtgctgtcagaacatcatattgtttagatatatcataatgcaatatcatatgaaatgatatttcacaaaccatcaatggtacatacacttgggaaattctggcttaactaaatccttgtacctaatttaataggtacttttctccaaaactattaacttgtatgaccttagaccaagaattgtgactagtacaattcacaaattgtcaaaattgaataccttatctaaatgcaaagaagtcttcagcataactttattttaaaacacagatgttgtgatttgatagtaaattattcaactggattctaatgagttatttgctgactgttcatgcatgttgacccaagtactcttcattcccacatctgtcctttagacagtctcctttttctgtccttccaactataactctgatttaatatttaatgaacaattactatgttttatattccttccctcaaagaagacaagctgtcccaagacattctaaaatgaccactcctcccacccctgtgagttctctgtgcaaccctgccgtccctggcctctccttctgtctctcaccttaccaagctcttagtcctaagtttcaggtaatggctattacaccctcactgaattttgagctgaagagaatattaattacctagtcacatctagttttacagatgaaaaaattgagacttatgttttgacagtccatacttaaatgctgaaattttttttaattgggttcagcatcttcacagaattaaccccaatcatgacagttcgaacatttcctgaaaacaccttgtattgctgtctatttccatcggtttgcaaaatgatgttgatcttgttttttacattatcattttttttttttttgagacggaatcttgctctgttgcccaggctgaagtgcaatggcacgatctctgctcactgcaaccttcgcctcccaggttcaagcgattctcctgcttcagcctcctgagtagctaggactacaggcatgtgccaccgtgcccagctaatttttgtatttttagcagaggcagggtttcagcatgttgaccaggctggtctcgaacttctgacctcagatgatccgcccgtctcagcctcccaaagtgctgggattacaggcgtgagccagtgcgctcagcccattatttgtttatctaatagcttaatcattcatcactgacattttgagcatttaaacaacatcatcctcaataaagttctagaatttctccaacgctgtgttctagacatggcacttcatgtgaacaattccacaggaagtaggtggtactattactattcgcttttatatgtgaggcagccaaatcataggtagataactggcctagagtcaaccattattaagcaggagagtggaaactagctttgtgtgatgttggagatcaccatttttgtcacttcattataatatccactttattccaggtgccattctagaggtataagatactgtataaatttataagacacaaattatatttttaacagatctttggtctagtttaaaagacagaagtaaaagtatttattcaccagatttacatacaagtaattttgggctattgtcacaattcaaatctaccttcataggagaaacattcatgattatggatatacatggaaccatgctgtatagacaattccaatcaaaatgctccacattgctttggacaatgtcaggatcactggaataagtacatagcatggcaaaatgagttttgtgttgtttttcctcctggaaataaagccaatataagacccctggtcaaccaagagaaaagcccataaaggcaggttccagtagctcagagtaagtgtataggatttcttgtgacaaaagcattgtgacatattatcagtgaatttcccttctcccatccaaatctggtgattagtcattaactccagcttaacagcaactcagcagtaacaacatgtactcggtttagttatctgaaataaaacaacaacaaaatgtttctagtggtatgactgttgtaaaaatatacattatatacaaagcagagaacttatacatagtaggagtttgctaaataaatatttctaattgattaaagaaaatacaatagtaagggcctgcctatttatacatataaataatttgagttatggaatgtaatgtgagattatataattttttctccttgtgctgtaagatatgaacaaagagattttagaagaaaaagatataaagaattgtatcacttattaaaaacttagtttattgaagttctttaagagacattgtacttttaaagaattttcataatagcctcaagtttcaaacaagtgaatgtctgtaattgacagccaactctaatgagagttgtggtgttggaaattagcttagtatcttcaattctttaccctgaactggtttacactggcacttgtagattgcatgttcttattggaggtgacattgagagattacattaagttggttatcgatcatactgtataggttcactttactaaaatgtaatctctgtttcaacaaatctaaatctgacaaaatatgccatttttatgccttatggactcagaggttataagggggatgagaggcaggttgcagccccaaactctgggcatttcaaatctagcccagagtgttatttattaaatcaaatgatacatatgaaaatgtttcctatatttaatatgcagatatgaaactatagtactttaaaaagtacaaaacaagtgtcattgaatactttctatctacaaaacattctggagagtatttgaatgaataaatcaattccctccagatatttagtagtaaagaaattctttatgccaatagtgatttatctatcctaattatcataacagaagtaaaacaaaatagtgaatatatttattttattatttctagcttatcttattaattgtgtcagcttcttttcctatttttcctcgtatgagttaatctggtcttattctttctgaactaaccatatcctaccctgactttaccaaacatacaaaagtaactatagccaaagctactaatattaatctggacttccttatgcaaaacaatgttcacattcatttaactgcggactctaatccccagagcctatttaatcattattgtgatatcgtttttgttacttcaaacatttggcatgcaggcagaaacatgtatatgtgtattcctgggaaatctatcaagcagattcccaggaagtctcctaaggtgatattgattacattcataatattattattgttcagagaccttgttgaaaaccaagaggtggtgaaagcctaagcgaatgacccattaaataaaactcagtagactgatgtatacaactaaaaagccaattaatttaatttatgagaaataattatctagaaaccctgaaactcaaaattataactactgcatcctctctctatggcagttccacataatcagctccatttgggggcttagaatcagcatgaaaggaattacataaatcacatgaattgatgacatacggctaagcctgtttgttgcattattttgctacttcagtctgctggataaaattcctctccattggatagtgctttgacaatcaccaaccacttctgctcctacaactctattttttttccaaacttttaaaatggaacaaataccattctgctcatttcttatatatatatataaaagacatgacatatatatatatatatatatatatatataatgtcaaacagattaaaattagttctttctgacttacaaatcaatccatctcatataggttagtttacatttttctattctgatccatgtaccaattttaaagtttaactctttgcagataattgtattcctcacatgtccacattgtggggacaccaaagtactcacagcatattctctaaggggagatgtctataagtcaacattataaaatatgaacattatgtttactgtcagtgtctcagttaacaaaataattcattgattctcagatccatatgatttttcacaatttcaacatctctgaaatcagcatgtgtcttactatcggtagcatctcacaatctctattggccaagccgagacggtggcatgggtgtctcttcctgtggacatgtggcacttgtatcaaaacttgaagaataggcctcagtgccttagaggaaagttctggagacaatagaggctcaacctttttaagaactctgtcaccaatgcttttgtagacagagagaaccattcagagggcacatcagtgattcaagccgcaaagtgtttcaagagcgttagactatgaaagagaagaaatttggggaatggctcaaccaagtcatgtcacttatgttttccttttcaagtatgcacaaaagtgatataatttttaaaagattagaagagctcttttgagatgcttcattttctctttcttaggggttcacgatagagtggtgtatcttacaatccatggcctcctaattatgaaatataacaatgcatactttcaagtaatattccatctgtatacatttattagacattttagaaatactaggagcagaaatcaacatctttttcaaggcgggcaaatctttatttactcctttgtaaaggatcattttagaaagtcatttccttattctgaaatatgtagtggataaatttaagtaatattttcaaattctgtcctaatagcaaatggaaaaattaaagctgttgattcatgaagtatgatgatctattctattaccacagagtcaaagccattacatggtttgcctgtgaaaaaatagtagagaatacaaatttgtgtagataagatatgggaagaaaatgtcatgtttaaatctgtaaatggaattccctggaaaagggttagcagcaccactattaccgatgtgaaaaattcagagcttcttgcctcttcctctctgatccagagatgctgctgagaaagaaacagctctgttttgaagaggctacagcaggcaggcatcttcatgcttacacaggcctctctctgctgaggtggcctcttggggaagcctcacaaaaactccctatcctcagctcccaggatcaggggagaaggatgcccttgatggcctgcggagatcttgagacaaggcatgcggccaggacagacgttgattggcatgaccctcagtgagaatctcagtgaccttcctaggacctcctgggtctgctagggcacatcagtctctgagtctctgtgttgcccacagccttctgtctgcactttcctatttgacagaaacagcttcataaaagcagttcccataaattgaattcccgtggcttgacctaatttactatctccatatgtcggttccaaatcagcagcaggcatatttacagacctgggttggttggcttacccaattaaagatgttaagtaattaaagtgtattactttttcaagtatggagtattatttttcaaataatgcagtatatccttatatactgcactatttaatatgctgttctaatttaaaaaacaataaatatcattactatgagttaggaataaaataactggtgagttatatatatacaaatttatatgtatatttgatataaaattatatataaatataaatacatttacattgtatacaattatatatgtgtaaataatatttattatctcattatagatatatagatctattaatatatagatagatgatatatatagatctatatatatgatatcaatatatgtgtatagctatagatgatattaatgtggaatcacaactagaaataaatagtaggcaaaggtaattttgaggccaaaaatataaatacttataatctctcacctttaattaattcagattttaaataattgaccaacttattttaaattattttctatggaatttctgtggtgttttacctctctaaaagtgtgtgtgtgtctgtttgtgtgtatatatatgtgtgtgtgtgtgtatatatgtgtgtgtgtatatatatctacatatgtatgtgtttatatataatactttataggctatatgtcagtaaaatatttgaaaagttttattctgagccaaatatgagtgaccaatggcccatgcatgatacggcccttgggagatcctgagaatatgtgcccaacttggttttacacattttagggagatttaaaacttcaatcaatacatgtaagatgtacattggttcagtctggaaaggtgaaactgaagcaggaaggagttagggggcaggggcttccaggttataggtaaattaaaagattttctgattggcaattgattgaaagagtttaattatggtctaaagacatagaatcaagagaaagcaatgtctgggttacgttaaggggttgtggagacaaaggttttattatgcagatgaagcctccaggtaacaggcttcagagaaaagtttgcaaatgtttcttaacaggcttaaagaatccattctatcagtcttaaggtctgtgttgatgttaatgctggtcagctgggcctgaatttcaaaagaaaggagggtataaggaggcttatctgactcttcctttctatcagggtctgaactagcttttcaggttaactttaaaatgcccttggccaagaggtggggtccattcagttggctgaggggcttagaagtttatttttagtttacatagatacacacacacccacagagagagaagaggaaggaaggaaggaaggaagggagggagggagggagggagggagggagggagggaaagaggaaaggagggagaaaaggagggaatgggagggtaaagaatgaggcagaaacaaaacggaaatacccttcacagctaacctgtgcatttgtgctgccattgggcttgtcattagttgtgttggttgttccttgcacaagggcagccagactagtgagtcagggctgaaatcagttcctgttccacttggaaaccacatgctctggcacccatctgcatttgtggggaaagtgacacctttttctaattcatgcaaagacaccatatgggctacctgtggcctggcaacagagtctaccacttatacccacagaagattaagcatttgtgctcatcattaccctttccagccactgtcttttaaaatctagtgacacttcagtgcaaagttgtttaactgataccttgtttttggtgaattgagtagatactggcaacctaacaaaccacgagaatttggacagaggcatccccaaaaaagcagtgaggaaaggaagtgtttgcagctaaaatacatttaattacatcctgggaccacttcaacatcttaagcatgtggaccacagctacctcttcattaggtgttgctctctatttgatttacagaatgcagggtcagcacttgtgaattagcgtcgtgaataagacattcataaaaccttatcagttcagaaccgatgctaagacaagacgcaggtctagagctcataagactggtgacaatttcacttatttatgtcagagaaatgttacacctgtgtttttatagcataaagttggtgagccttcctctgtgcaaacctcataagccagacaacacatgcaattaattgacagagacaagagaatccccatttctgttttctgcatggctgctttgcttacatttcagcatactttacctcagttttatttttgaacttgatctagtttggattttgtacacccctaaaaattacctaaactcaattgtaacactagactgctgctgaacgtcatgcttatagagttggaagtgttctgttgaaggatcatttatccaaaagcaacagcaaagatttatcgatacctagtaaaattctgccattccatccttcactgtccagctcccttctgaagatcggatattcttttaaaggcaaataagacgcatagtggtattttacttggaaccttatgagagagaactcaatatatttgaagaccctggcatttgtttttaaaaatactttattgtgtgtgttttttctttccccatcatagcattgttaggggagaaaattgcattatttaaaagtatattatgttagaagccagaagtcttgagctatatttctctgctgtctgtataaccctgagtccatggacaaataaatttgctttcctgagcctttgttttcctgtttagaaaatgagacaattgatctagataaaatttaagctcccatccaatcataaatgttccataatactaatgtagaaaaagcaggttactcagaactatttctgaatccaaaaagatagatagatagataaagctactttataaattatgaattttttttgtagagtctgagactttatgtaaaagagaaagagagatggacatacagagagagagaaaaaacaaaacaaaacgaaacaaaaaacagagaaagaggtgctggatatatttggaccctcctttgtgagaagggaaaagatgatcccaggagaagatgggatcatctcatccaagaaaagatgatcagctagaaccagattgctggggtagtctagaacaaacatttcaaaagaggttcactactttatgaggagacagttctcaaacaagaggatactctgtgaatagatgtattagaatttatcaacagaagcactctttcttcaccccttccagctatagtaccctgaatattttgatattttaatgcaaaagaagacatatttccctaggttttaatttttgactacccaagaaaattatcaacctgtaaattgcttttttctctatattgatataataattagaaccaagctaatcagatgtgccattatgttctttccttcacatcatagtgccaggcaacattgaggggacagctggccagcctgatgccaaaagagaggcatctaagcctcttcaggcaactgacatttataggaattatggtatagcatcaataattcacacaacctcacaacaagtgctggtaagcagctggtctgtagacaggggcctcatcacttactcatgtttgagacatttatactggttcattgccttaccttaaggcttctttaattgtagggaccacgaaaagaatgcagcaactagcaattaaagcaaaagtgctgctctgcattataagggtatatgttgattacttcatggagagggtgattggcttttgaaaccctaagtgaatgtttggtcacaaaaatctaacattttaaatgatcaatttatttctgtttatcatttccttgagctgtgaattgaaaagaaaaaaactctaccacttattttatagaatcttagacatttagtattgaatgtttccttagaaatgatccaattctttattttgtttaaaaaacaaagatctagagaactaaagtaactttcctcaaatcagacagctggttagtaaaagttttaagactagaactcaagtttggtgaaaatgtttcccctaactgacctttgcatgcacaaagttcgactgattataatccttggcttgggacagactgtcattattcatcaataacttatcaacttttattttacaataatataataaaggcttatggacccagcagccctccaaacagcaaggagcatgtcaataatatgctgaacttatggtccttctcattcccctttccttctccctttgctacctagaagtaaccagcaacctgaatcctgcattttcttgatgtactttgcatagttttatggcatgtaaatgtatgtcttaaaaatatatttttaatttataaaatgtgtatcatgctgtatataacatgacataatattgccaagactcatccatattgttgtatatgcctgtatcatagtgtatttttcactctcccattaataagcttttggattctctctaagttttttccattgtgaacagtgctgctatgaatattcttgtaaatgtcacctattccaaaggtgcatgagtatcccaggggtatatacttagcaagaatttcttggtataacactatacagttattcagtttcagaaattagtgacaaactatgtcccaaaggggtggcaccaatatggactttcaccagcagcgtggaagatcctgtagattgtatctatctggcttttactgtagagggccatacagtcattattgttggctctatgggcctcatatggtttctttggcagctactgaactctgtcattgtaggtaaaagtagccacaggtaacacataaatgagtttcataaattttcacagtataaaatattgttcttctgcttctttccaaccatttaaaagtgtaaaaaacataatttgtgagtcacacaaaaacaggtggcagactgattactttttctttcctcatcctatcttcttttatttattttttatttatttaaaaaaattattgatagcctgttacatgccataacccgttccaaattgatatggtttggctctgtgtccccacccaaatctcatgttgaattgtaataatcccaatgcatcaagggcggaagcaggtggagataattgaatcatgggggcagtttcccccatgctgttcttgtgacagtgagttctcacaagatctgatggtctttataaggagcttcccccttcgcttagcactcattctctctcctgctgccctgtgaagaggtgccttccgccatgattataagtttcctgaggcctccctggccatgcggaatggtgagtcaattaagcctcttttcttcataaattacccagtctgttatttctttacagcagcatgagaacggactaatatacaaatactgaggattctgtccgtgaacaacttataactttcctgctctcacagagtttgaactctaatcagaagaggcagaacatagacaaatgtatatattctaagcaagtcatgataggtattttaaaggcagattcagagaagtagatgctggtggtaggaggtaatagtttacatagaatgatgaggaaagccctgtttgatagaacaacacaagttgagttcatttttaaatgagggattggaacatccaagtatctgaggagaaactactgagtgagagagagcagcaaacctctacacctcctcccctgagcttttatggttctaatagcatgctgatatctcttcccaaatattccacaagctcctttaagtcttcatttgccaatctaaatttatcatctactacagccttggatttcctaacttggtgaagggcacctgtgtgaactcatcactcaaaccaaaacccttcaaattttcctgcatcttaggttgccttttactccaagcatcaatttactaaacaagtaatttcattttttcccttagtatctgtattagtttcctagggctgccataacaaaataccatggactgggtagcttaaacaatagaaatgtattttctcaacttctggagtctaggatcaaggtgtctgtaggtttatttttttgtctgtggcctttctccttggcagatgacagctttctctttgtgttttcaaatggtctttcctcatttcctcttcttgtgaagacatcagttggattagatgaaggctcaccttcctggcctcattttagctttatgtcctctttaaaggtcctatctccaaatatcgtcaaattctaaagcactggggattaagacttccacatataaattttgagaggacacaattcagcacatgagtatcttctaatctaatacctttcctctgcttttattgctaccaccttaccatttccttcccttttttatttatgtttattggttttctgattctagattatactcttaatgatcaattgtccccaaaaccagcagaatagtcctacaaaaataaaaatgtgatcttattttattctgcttgaatctttgatttgttccccagtagccttcaggataatgtccactggcatactgtatcctcaaagaactgcaccatctgcatccctgttcttcctctcaccaggtaaactctcatgctgtcagctacaacaatagtaaactatttgcagttcagggcctttacaaattttctttgcctgaaatttcatctctgccttaatccagtctttttaagtgacagattaatatattccaagaagcatggctcaatgtcatctatgaaaaacattagcataccatcattttcaccattgtctgagttagctgttcttcctctgtctcccaggtcatgatatctttcatatcactgacattgtataggataattatttctgccttggactaagtgcctgtgaacagggactgtgtcctgatttattcttacatctttagtgcctagcaaagggctgctcctcttaggcacttagtaaatatttgttacatgagtgaatgaataaatatataaaggaataaaaatgattagatagaagaaacatttttgtatattattttgatactctaaagctaatattctaatggtaatcaatatagtttaaaaataaaccattcaattttactaaacaaaatggtgaactataattggattacatggtataattatgacaatatgcatataaaaattaaaagcctacatagcaaattaatacaccaataattactaaaaataatacactaataattaaaagtggttgtttctggttttttttttttgcaaatgattaagctgtacacaatttattctttttttatacttttctgtatttttcaaataaacttgattctatgaaatatcccatgacccaattcatgttaagcaaatttactacccttttctcaacatcttcaaactgttttctttacatttcactgtttagaaaatataaaatgatatctgcaacaaattacattctgctacaaatccacattttcacgacaagaacaaaaaaatgcataacaaggcatagaggataaatttctctccaacccactgtgaaattttcattaagcccctcatatcttctccaggtctaggccctaaggacaaatgaagagtctaatctttgatcaaggcttacttcaagccaaaattatctattgctctagagaaactcttccaaatggtcataccctgctgctatgaaggtgacagtcctccccactgctcacatattgcatagctgcaggatgcgaggcaaagacttgaaaaacaagattaaaccttactcaaaacattatttccattaaaattacatcacaccgaatatcattacctaaatatttttatctttctgtaactcttacaaaacaaacattacccttgaggcaaccttgcagaataactttcacttaggagaaatgaaaaaggaacagacattataattgtagggaaagaataaaacaataatggtgcactttcttaagaccttcccttatttttttttttttcatttgctgattatccctttggccaaatagtagaactgtggaggttcagagatggaaggaaccttactgatcatctagtatgtatagcataatttacagttgtggaaatttaaagcccagataagccaaggaacttggttaatgtactgattcttcttcctctgggaaacctaggaaatgaattggatgataagtgacatggctctgttattaatttcagccatgtgattgatttcacaggttcttcagttaaaaagacttgggttctgtcccccttttaccacttaccatctgtttaaccttgggtagattatttaggcctttaaaaacctccatttcctcagttgtaaaatatcaattttagaggacctatcatgtaaagaggtgttaggattaaatgacaaattgcttagaactgtacttgggatcatagttggctactactattgttgttgtcatttatcctacaggtaatcctactgtttgagataaggcattctgggagacaagatttaagagcttttgaagaagacaactttatcacatttgcttcagactgtttagtgtgtgtccagcttcaatatctctctgtttcttagacattttaaagactgttaaaggaggagaaaggccagattacaacaattgttgacatttagtgaaggcttagtataaaacaggctctctcctaagtgaattttgtgtagtaacccatttattcctgaaaacagcttcacgaagtaggcaggcactgttctaatatctgctttgaagatgaagagacagacgcaggggttggtttcaacatgtgaaagtatattttattatcacctcccacattcacttctgcaattccaacatttgcaaggcaagagaggatttgccaccctctggtgtctctttttttttttttttttttgagatggagtctcgctccagtcaccaggctggagtacagtggcccagtctcggctcactgcaatctccacttcccgggttaagcgactaccctgcatcagcctccccagtagctgggaccacaggcgcgcaccaccatgcccagctaccctctggtatcttgggtttgatcttctgcttcgggctgtggcttcaggagctggcagtggcttgcgtggtggcaggagaagttcccaccagtcctctggctgtcataacatgcatttcatagctctcaccatatgtaacagtgagcaagtttttatttatcaaaaaggtagcctttgatgaggggcttgactacctgcttatgaattaacaaatagcagatataaagatttctaagtcatgctcttagggcaagaaaatgctttgaaatactatctgatctgcttattttctgggttttcgccttctccaccccttccaagtcaaggtctgagtctgagttctattggatattcactacaactgagagttattattgttctcagctttgagccttaaactaggcttttagaaactctaagcaagatagcagttttaaagggaagaatttttcctgaatgactaaattaggttttatcatagtcaaaagcatagattaaccaaggcaagctctaaagtaagaagcaatatggtaaaaagagagcatggtaaaaacaaagttcttatcacatcttaaatagaaaggcctttctattaatggtatacaagagagaaagcggaaggagagagagaagagatgggagaggagataggaagagaaaggggtagaatgaaggaaaaaaagaagaaataaaattgctgtgaaaggagagcaaaggatagcagagagaggaacaaagcaaaaccagacttccctcctcccctcactttctgcttggtgcccaaatccagagcagaggcagaatgcagagatacccagattgttttcagggaactaagatagggagacacataaggatcatctccttcaataaaaagagcgttgatgtcctcataaattttctctattcttaatgtgtcactctcctctaacagccatagtcagtaaactttttatgaattcccttcttagctttgtgactcatgtctagatttagtagccctgatctctgtttatcatcccttaaccttagcattcaaatgattcaccaatttatgcatgcaattgtattgtgatgccttattttccaatctccaaagaagtgtcatttgggaaatattgtacaggtctggatataaatgttactctatccaacatgtaactcatatttacaaattgaaaaagtttcagaatttttatggggacatttaaaaacgttaggtggcttaaaatattccctactgatgtacatcatctcatttgaaataatgtattcgatggaagcaaatgatctagtgaagagtattcttcatcttgctttccataataacttacggccgtatctcagttctcaaaatgcttttccaattacagctagcacttgatcatttgcgtgcacagcactttacctgaacgattgttgtggcacttttacctttctaccttgccacctgtcctgagaccctcctcagaaatcgtagttgctgagtctggagtagagaggttggtgactatgcagtaaggatacactgtgtctaacttagaatcttacaagatgtcactgacctccatctcctttgaagactctccgtgacctctaaaagttggagttcctgaggccttaccctgggctttcttctctttgcttgacgtataaatgttttgtttttgtttttgattttttgttttttttggcagtcatctcttccatttccatggcactaaatgccgtcttcatgctgcagctccaacatctgttaagctccagatgtttatatcttgttgtttaccaggcgtcagcatttaactgtctctcaggcatccccaatctgacttgttaaaaatgaaacttttgatccctccaccaggaaaatgtgttctttcattattcatttagacaaaaaactggcagtcatcatacacactcgtctctctttctctccttttctttttctcactctcttttactacctgccatatccaacccaccaataacttctattttttaaatttctgtcaaatatatgttaaacttattgaccttacatccactgccatcaccctgattgtagctactgtcacctccattcagggctacaagatcttctacccctacctaccccaatccattctccatgtaacagacagagtgatcttttaaaaacagaaattcgattgttttgcttccctgcttaaaacctgtcggtgcttcctatcattctttgtgttaggtatccacactccttctcggggtctcaaaccttgtgcagaatggcttcttgctaacctcagcctgagccccatctcattcattcagccttttgttttttctggaactcaccaagttgtttctcctcttacaacctttgtgtcagaggcattcaaaccagagcaactccatcttgaataagagctgggtgaaataaggctgagacctactgagctgcattcctggacatccttaggcattctaagtcacaggatggaataggaggttggcacaagatacaggtcataaagactttgctgataaaacaggttgcagtaaagaagctggccaagacccaccaaaaccaagatgcaatgggagtgacctctagtcgtcttcattgctacgctccctccagagtcatgacaatttacaaatgccatggcaatgtcaggaagttaccctatatggtctaaagaagggaggagtcctcagttccagggaattgcccacccctttcccagaaaactcatgaatagtctaccccttgtttagcatataatcaagaaataaccataaaaatgggcaaccatcagccctcagggctgctctccctatggagtagccatttttttatgcctttactttcttaataaaattgctttcactttactccatggacttgctctgagttctttcttgtgcgagatccaagaatcctctcttggggtctggattgggatccctttccagtaacatttgtaccatctcttccttctatctagaactttcccctgtcccacctacccatgcccctcactcccaacccagccttatcctccatcacttactttttgatcttttaggaccagttcaaatatcaattgttttgacacggtccatgttcaccctaaggagatccttcctgttggtattttttactaaaatctatttatttcctgaaaattacccatcctattgaattcttatttagtctctttccctgtttcatcttttaagatattctttgaaggtcaagtccatgtctgttttattcaccactaacaagccccattacctgggcccatggtaagcagcttattgaatgaatgaatgaatgaatttcccaccaataacatgtgagttagataggaactacctcaagctcatctcagagaagtgctttttcacatgtctaaatcccccatccttcagccccttcatcacttttcttaaaaagcacttggggctggttgcgagtaagagtgggaaattcaaatttgcaaagttagttcctgatagttcggaaacgtgtgtcctggggatccaatcatatgatcatttgttctgcttcaggttctttgctagccacccatatcctgctccagtcaattcgcaccctttagttcccaagggcgtaggtcagaaacaatgctcagtactttcaatcctggcattgccagcagcaataggtcaggcaaacactggggttgctgggaccacttagaatgtggaatgggaaggagcagttctaagatcattaatggtttcagcatagaaaaacaaaagtccagagacctgccaaacccctgtggggtaattgtggttctgtaagaacttggcctctgagttcggcattgcctgtaattacagcctttctttctttctttttttttttttctactttaagttctggaatacatgtgcagaacgtgcaggtttgctacataggtatacatgtgccatggtggtttgttgtacctatcaactcgtcatctaggttttaaatcccgcatgtattaggtatttgtcctaatgctgtctctccccttgcccccgaccccgcaacaggccctggtgtgtgatgttcccttccctgtgtccatgtgttctcattgttcaactcccacttacgagtgagaacatacagtgtttggttttctgttcctgtgttagtttgctgagaatgatggtttccagcttcatccatgtccctgcaaaggacatgaactcattcttttttatggctgcatagtattctatggtgaaattacagcctttctattcagcatcctcatttgtaagcctctgaaatgtctgagattatgattatcagtgcataagccctacactgtgagcttactaagaatattttcttatgtctgctatcattgggtgatatggtttggctgtgtccccacccaaatctcatcttgaattgtagttcccataatctccacatgtcatgggaggtacctagtgggagttaattgaatcatgggggcggttaccctcatgctattcttgtgatagtgagtgagttctcatgagagctgatggttttataaggggcttttccccctttgcttggcactgctccctcctgccaccatgtggagaaggacatgtttgcttccccttctgtgatgattataagtttcctgaggcctccccagccatgctgaactgtgagtcagttaaacctctttccttataaattacccagactcaggtaagtcttcattagcagctcgagaatgaactaatacattgggctaaaataaactgtcccaatatataaggaccacgttgtaaaaacttctccactgcttccgtcttttgcctagaacatagaacaggggttaaacgcttccatggtgtgtaaagttgagtgatagattaaaatgtaccattggtcaagagcagtagctcacacctgtaatcctagcagtttgggaggccaaggtgggtcaatcctctgagatcaggagttcgtgaccagcgtgaccaacatggagaaaccctgtctctactaaaaaaataaaataaaaattaaaaaaaaaaattagccggcatggtgtaatcccagctactcgggaggctgaggcaggagaatcactttaacccaggaggtggaggttgcggtaagccaagatggcaccattgcactccagcctgggcaacgagtgaaactctgtctcaaaaaaaaaaaaaaaaaaaaaaaataccatgaactaggtgacaaaataacagaaatttatcctctcatagttctggggagccagaattctgaaataatgatgtccacagggccatgctctttctgaagtttctggggaaaaaaatctttccttgcctcttccagcttctggtggttgcaatccttgagttctttggcatgtcactgcatccctcccgtctctgtcttgtcatcacatggtattctccatgtgtgtgtccatgttcagatccccttttcctatgaggataccagtcattggattaaggctcattcttactctaacatgttatcttaatttgattacatctgcaaagacgctatttccaaataagatcacattcacagtttccaggtggacatgatttggggatgatactattcaatgcagtgtatgagggttcacttgtattcagttatatcaggtaataccattaagtgtttcttaagcttttaatatttgaaaacaaccttattcacaataattgataaaataactacatttcagaatttaaatatacctgaacaagaaatgacaaatggttgtcaagtacttttatgcttagaataccatgctttcctcatgcaggaaattggaacagaccctggtcatgggcgtgttaaatcctcctctttcatccaccactgatctgtctcataacttgatcactcctatggaactgactgtcatttctcagtttcattctaggaggcttaaaagttctacagagcaaaagtatttttcttcctctttttgcttttttgcttgttacttttgttgaggggtcagcaaatgtcctctgaagagccagatggtaaataatattagtaacattaggctttgtgggcctcacggtctctaccacaactattcaactctgcctttgtagtgcaatggcagccagagataacctgtaaacaaatcagcatgcccaagttccaataaaactttatggacactgacatgtgcattttatataattttcatgtattgtgaaatattattcttcctttgatttcccatccatttaaacctgtgaaaagcattcttagctggaagactgggccaagaagaggtgggccagaatttgttttctgatttctgccaagtcttgttccctctctcttgttggttgtctgcctttgctccaccttttctggcatagaggacattctgcagggtactgtgtttcatatcctttttttcctttcccttctcctcctgcctttgaccttccctttccttttcttccttccccctcctactactatgtccctaaaataaatattcactacccctaaactatatttgatcattgcacattgattactgtaatcatttcctattttctaaaaatttgatgagtgtgatgtaggtcatggtgataacatgagggtagtcattctcttatttagaggtagaaattagatttaaatttctggcataatataagtatgaattgtaataatcccctgaacattattagaaatgtagattttttctcttctgagtgatcagcctccaaacatatccaaaattggagagagcactgtaaaagtcctgtgtccccgttactcagcctcaacaggtttccattcacagccaatgttgttttatttgtacctctgtctcctccctcctgtgaaattattttgaagcaaattccagacatcagtattttcactggcgtccctgtgaagagaccaccaaacaggctttgtgtgagcagcaaggctgtttatttcacccgggtgcaggcgggctgagtctgaaaagagccagcaaagggagatggggtggggccgttttataggatttgggtaggtagtggaaaattacagtcaaagggggttgttctctggcgggcaggggtgggggacacaaggtgctcagtgggggagcttttgagccaggatgagctaggagaaggaatttcacaaggtaatgtcatcagttaaggaatgaacaggccattttcacgtcttttgtgattcttcagttacttcaggccatctggatgtatacgtgcaggtcacaggtgatatgatggcttagcttgggctcagaggcctgacaagtatattttagtatgtatctcttaaagacattgactcttaaaaaaaaatatatatatatatatatatatatatatatacacaccatcatagtaacatatctagaaacaattaatacaaatttcttaatgtctttaaatatccagtgtttacatttccctaattgtcctgtaatttttttatgtacaatcggattgaattgtaacctacaaactgattagttgatctacttcttaagtctcttaatttttagattcaatctttttctgtctctctttctttctctgtttctcttccccctattttaagtttatttgtaaaagaaagtaagtcttccgcctgtggtgtttcctacagtcttgttaactgatatcttcccagtggtatggtctagagatttgaggaaatttatgttgtatttgtttgttaataatattttataattgttgcagtatccttccatcaagaggtccaaatgtctacttgtcgttcttttgtggtgttagcagccatggatgaccattagtgtaattattagcagttgcaaaatcatgatgttcttcatacagttggggtatttatcccttaaaaaaaaatgctacctgttgaactagatgattatcctgcatttttataggaattataggacaagtgtttatttttttctttaataagatttcaaaataaatttgttttctagtattctccaaaggcaatcaatgaaacctaatgtttgtttattaggcattatgtacttcagtctattttttttttttttttactttaagaacatattttatttaacccaatatatccaaaatattaccacatcaatgggcaattaatataaaagtttattaatgggatattttacattcatcagttcatcctacatcttttttttttttaatactttaagttttagggtacatgtgcataatgtgcaggttagttacatatgtatacatgtgccatgctggtgtgctgcacccattaactcgtcatttaacattaggtatatctcctaatgctatccctccccactccccccaccccacaacaggccccagagtgtgatgttccccttcctgtgtccatgtattctcattgttcaattcccacctatgagtgagaatgcgcagtgcttggttttttgtctttgtgatagtttactgagaatgatgatttccaatttcatccatgcccctacaaaggacatgaactcatcattttttatggctgcatagtattccatggtgtatatgtgccacattttcttaatccagtctatcattgttggacatttgggttggttccaagtctttgctattgtgaatagtgctgcaataaacgtacatgtgcatgtatgtagcagcatgatttatagtcctttgggtatatacccagtaatgggatggcagggtcaaatggtatttctagttctagatccctgaggaatcgccacactgacttccacaatggttgaactagtttacagtcccaccaacagtgtaaaagtgtttctatttctccacatcctctccagcacctgttgtttcctgactttttaatgattgccattctaactggtgtgagatggtatctcactgtggttttgatttgcatttctctgatggccagtgatgatgagcattttttcatgtgttttttggctgcataaatgtcttcttttgagaagtgtctgtttatatcctttgcccacttgttgatggggttgtttgtttttttcttgtaaatttgtttgagttcagcaaagtctcaggatacaaaatcaatgtacaaaaatcacaagcattcttatacaccaataacagacaaacagagagccaaatcatgagtgaactcccattcacaattgcttcaaagagaataaaatacctgggaatccaacttacaagggaagtgaaggacctcttcaaggagaactacaaaccactgctcaatgaaataaaagaagatacaaacaaatggaagaacattccatgctcatgggtaggaagaatcaatatcgtgaaaatggccatactgcccaagctaatttatagattcaatgccatccccatcaagctaccaatgactttcttcacagaattggaaaaaactactttaaagttcatatggaaccaaaaaagagcccacatcaccaagtcaatcctaagccaaaagaacaaagctggaggcatcatgctacctgacttcaaactatactacaaggctacagtaaccaaaacagcatggtactggtactaaaacagagatatagatcaatggaacagaacagagccctcagaaataacgccgcatatctacaactatctgatctttgacaaacctgagaaaaacaagcaatggggaaaggattccctatttaataaatggtgctgggaaaactggctagccatatgtaggaagctgaaattggatcccttccttacaccttatacaaaaattaattcaagatggattaaagacttaaacgttagacctaaaaaccataaaaaccctagaagaaaacctaggcattaccattcaggacataggcgtgggcaaggacttcatgtctaaaacaccaaaagcaatggcaacaaaagccaaaattgacaaatgggatctaattaaactaaagagcttctgcacagcaaaagaaactaccatgagagtgaacaggcaacctacaaaatgggagaaaattttcacaacctactcatctgacaaagggctaatatccagaatctacaaagaactcaaacaaatttacaagaaaaaaacagtctattgcaattgttactcttattcatgatcacattgtcccatgttcagccagtgggtgtaccttccagttggtttttaaatatttatgacatgaccttcgttgtctgctgtttcttcctttgggataaaacaggttgttctcagctaatctcttgccccacatctggagcctgctacttctctgccccacccactttgcttctctgctcttcatttggaataggaagcataattcatttacctctgtggaaactctgttgttttagaaggggagatgccactctagcagtactatcagagggtaaataatggaaccaaccaatccagcaactctggcacttctgaaatttagacaagggggtcatgttgtgtacttggaatgcacctgcattatgttgtggagagcaacacaggcaaactctgaaaaccaccctcatgtgtggctcactctgaggccttcaataatgtgttctttggaattcagatctgctcactgcacataggttgcaatagacatcatattattcccataatagtcttcaataaatgcttctgaaacaaatatcaatgaataaatgacattttcagcttttagagatgaaaatgacctagcccattttgtctgatactccatttttacctcaggaaactaaggccttgatatttcaagtgatttgtccaagttcatagtgcaaagtagcagatttaatccccaaatcatctgacctcaagtgcatcgtttcctactatacctactgcctctagactgtattagatcatttagcattaattattttgatcattgtccatttcttttttttccttccttctatagggatgaaaaaactttctaccctctgaatttttgataattgagcctatgaaatcaactgacagtagacacattaacatgaaacagaaattttaattactgcaaatgcatggagtcccacaaaatatgggactggaaaatgtgttcgatgactgaagcttatataacatcctgagctacagaaaggaataggggcctgaggcttctaagggtggtggtgacacaaattatgtgaggtgaggaaaggaaatgcatgtcgagcaaaggttaccttgtcatgcagataaagtctctctggtaataaaagttgtcttcaagcagccctcagaagaataggtgcgagtctgagtcacaatctgggcatggtgtccgcccttcttgtgatataaatccatcttccctagttgatgagattcccagagagacaattcatgacaaatgtgtttctttcagaggacctgcccttcattagaaagggaaagttcagaaaaaggttctccctgcgcttttgggggagaaagaggggcaagaaacggaacagaagagcagagagaacttggttctccttcagttcaaggcactcaggatatcaaagcatcatattttggggtattgttttgtggaccccagcacctcctttatttctctttctctctgtccctcttcccttctctctctctctctttctctctctctgtgtgtgtgtgtgtttgtgtgtctcttctttctaatgtaaataacatgagcctcctgtgattgttgttcccataatagtgagtagcaagtctaacaacggttcaggtaacccccaggcaagcaaaccaaaaaaaacagcctgttcaccgttcactaagctgttcgtacagtacatccctatgcccatttccaagtcttagatgactttttctagcacaattcaaaaagtactttatttcacaataataataatagaaactcagaagctttactttctcacttacctaagtaagggtggtaatgttttaggctacagaaataatcatcacttaccataaatgaatcaccttagtgttgccagcatactgaaaaagcaaatgacaaacaagataattttgatagtcactttattgccttcctgtgaagtgctaaggaacggatttattttcttgaacgtttccccttggaggatctgctgaaatctttttaattccgaaatcagagatttgctagcttagcatttggcaaaaatgatgatttatcctatttaagcattaaactatctatgtctatttgggtttcaggtgaccagatggctgagcagggcacctttacatcttttattcttaattttatttcattaactcagcaagtatttattgaccactagagtaccaataccagataacctgtaagggaataaggattaaacagtgaaaatggcacccatagggaccttaacagagtagtggctacaacaaatatgttacagagacactgtgataaatgcaaacacagacataaacataggttgttagggaagcatacggaaatggacagctgatctgcgcttggccttgcattgcggttttgggaagtgattggtattttctgacaagtgctttgaagctgagacctaagggactaagcaaaagcagagtggcagtgtcctgcatgggggcagaatttgctggatttagaggcacttgaatattttgataagcctcacagagaattttttttttaatgagtgaaatcaccaaatgcatttgtacttttgttaaaattaaagttgagaacaccaattttagtccctttgaatatgttaactgtgctatcttcaaggttttctttctccaaaaagctatttctagctaattatcctcactaaggaaagtgatctgtcggactgtgttgctaaggctcctcacaatgggggctgctgcagtgactagagactgagtcaatgaggaaaattaaatacttccagggactgattatttgggaattttcttccaagggaagttcagagaaagcccctccctgcccttctgggagaaggggtcaagaaacgggacagaagatcagagagactttggttcacctttagttcaaggcactcagcatcccaaggcaccacactgtggggtattgttttgtgaggcccaacatttccttcctttctctttctctttctctctgtctctcttcctttctctctctctctctctctcttctttctaatgtaaataatatcttttgtctcatcaaagagtctttaattaagtctttttcctgggttggaagcaatgagaaagggtcacaaccccgtcaagggaaagtcacatataacacagcccgcagtgcccccaaggatgtaaattgcttggatgtgtttaatcttcccatgtttgaagacacagactgtgatgtgaactagggtcaacatgaaaggcagcgccatcttaggtgactttagcctgttaatagggaatcctcctgtccttttcaattgtatattttctgctgcatcaaagcttttcaggtaacggtgtcagaaagagcataatctctcaggttagcctggtacaacttaagtttaaactaactgctaactgaaaataaaattccccaacaataataaaaattttacaaagttaaacactaaagaattttttaaaatattgcataaataatttgttgtaggttataaatgtgtttattatttatatgctgcctctcattatttagatgaccctagcaggtgcctgaaaatgaacgtttacatttttaggttggaccataattacttattttgtgtatcttcttcccactagctttggtggcataaaatttgttattcatcttcacgtgcttaaggcctagaacagtgcttggaataaagcacattgttcaataaatggaagctcccatgctcacgactctgcttgccctataaggagacagtgtgtacacttaccatagaataattattatcttactgttcatctcagaaaaaaaaaaaaacacaatggttttaagaagtaccttgcaccttacacatacttttatgttgctctgtgaaaagtctttgcagtttagtatcttataaatattgtaagtaaaggtcaaattccacaggggtctataatttcaaatattacttttattgttttacctgtaaaaattttctaagtgttttttttaaacttactgttacagagctatctggtaggatctataaccccatgaactacattttattatttattttattttactttttggaaagacagagtctcaccgtgtttcccaggctggtctcaagctcctgggttcaagcaatcctcctgcctcagcctcccaaagagctgggataataggtatcagccaccacacctggccatcaactacatttcaaatggatgttttataggaatcatcattgatgataatgagagatatctgttggaaaacaaaatgaagaaagggttaaggagtattatcagcactgtcacgcgtgtctgtgtgaagagaccaccaaacaggctttgtgtgagcagcaaggctgtttatttcacccgggtgcaggcgggctgagtccgaaaagagagtcagcaaagggagataggggtggggccgttttataggatttgggtaggtagtggaaaattacagtcaaagggggttgttctctggcaggcaggggcgggggtcaaaaggtgctcagtcggggagcttctgagccaggagaaggaatttcacaaggtaatggcatcggttaaggcaggaaccggccattttcacttcttttgtgattcttcagttacttcaggccatctggatgtatacgtgcaggtcacaggtgatatgatggcttagcttgtgctcagaggcctgacaggcataatatttattgaacttctgtagactaatgggcactgttctgggtagcagagattcatcaatatataaaatctgcaaaagttaaaacaaacaaacaaacaaacttctctgacatcctggagtttattgccctttaagaaggtggtgggccgggcgcggtggctcacgcctgtaatcccagcactttgggaggccgaggtgggcggaccacgaggtcaggagattgagagcatcctggctaacatggtgaaaccccgtctccactaaaaatacaaaaaattagccaggcatggtggcgggtgcctgtagtcccagctactcaggaggctgaggcgggagaatggtgtgaacctgggaggcggaacttgcagtgagccaagatcacaccactgcactccagcctgggtgacagagcgagactctgtctcaattaattaattaattaattaattaaggttgtgggggagacagacaatacaaaataaacatcacaaaggaggaaattgttgactgtcagaaggtgatgtgtgctataggaaaaaatagaggtgatgtaggggtgggaagactttcctttatcctctgagggtttgatgagtgagtgtacgaaataatctgaagggaggcagatgaacaggagaaaagacacacaaatttgttacctacaggaggacatcactggagagaaacctgaacacccaaaaggccagtgagattttgaagcttatataccttcttcccagggaagaaggtagagtggatatagtcaaaatttaggggagagtaaataaattcggggaaagacaaatggcccagagcataggggatagtctgagtgcagggttcacctccaggctcccctcttgttttttgttgtcgtggtggtggtactggtgtgaagggtgaggacaatcagtgtgtttttcccctcagagcaaattgtaaagctaaattagtcattatttaaatttactatagttgcctttataaaaactttaaatttacattatacatgttgaaattgaagctatgcaattgtaatataaacacggatttacaactaaagcatgttataatgtaaataattgattttctgtatgaaatcctaggcaatattgtaaaattgtacagacccgtcaactttttccacttaaatattctgagtaaagtttaagggtgttgtagttttcaagtggttttttttctttgtttgtttgtttctttttgtctcttgtgatccaagttttcttctctggttggtgagattactggggcaaagatttcttgacaattgagttccttttgaaggatccttcctaaggccggtaatgggagctcagaaaaagctcctcactgcatttgctgttctccaggtgccctcagtttgaagcaaccagcatgccacagtggcacattttggggtggtattttcttagttccctcaaaggtaaaatgcagagtgggttatatgtttaaacaggacagttgggtgggcctcagtgaggacgtgccctgtgaatagaggccaaacagagatgagagagctagcccaggggagttttaggggaagcatcttctagtcagaggaaacagcccaggcaaacgtcctaaaacaggagcatctggcatgtttgtttgttggttggtttgttttgagatagagtctagctctgttgcctgggctggagtgcagtggcatgatcttggttcactgcagcctctacttcctgggctcaagcgattctcccacctcagcctcccaagtagctaggatcacaggtgcacgtcatcatgcccagctaattttttgtatttttggtggagacagagttttgccgtgttgcccaggctggtctcaaactcctgagctcaagtgatctgcccacctcagcctcccagagtgctgggattacaagcatgagccaccacgcctggcccatttagcatatttgaaccacagttaggtcagtgtggtgtagtagatattaggagtgattttttttttaatgaagagcaagcaatacgttatgaagtatccttaaataacagggagcgttctctttaaggttcctcaggaatggtcagtcatggatccaagatgacatttacttagcctccaagtttgaattcaagatcaaaatctaattactgttacaagcaacaagaatcaaagagtaacatctccttgctacacaggttagaagactccttattgccacacagatgaattcttgactagcaaatgcacataaaccacatccctacccagtgtgagtgaaaaaggaaagggaagattagcttgtctaagtatcgatgtaaatgtagtcagtaactctagctgtattttaaaaggattttaacatctctacaatggaataaaaacattaacggatatccttcttcctagaaaatggctaatgctttcctacaaaaaaagacacatatgagctccaaattgttcttcatgtgggtgagaatggtctgtcattatttatacttgttcacagtgcttcatctgtcatccatctttgggctgtaattgtgagcttaaaaataatcactattttccaccacctgcagaacataatctgcactttgagctcatttcctcagtgttccctacagagttccatctgctttacataccttatttctctacacatgattaaagctgctgatgctacctgaactgcatacatagctggcattatggaatgcctcaaactaccacagcgtgctgtggtgagatgcctttcctatcagagtctaggcttacaaaaatgcatgaagtgtttctcatatattgcatatttggggtgaaaaaagacaatgacagccaatttttaataagttatgtcagggagatcataattattgatcttctaaacaaaactatctataaatatatggtcttcaacttatccaccgggaagacagatgaaagtttcaaatggatcctcttacaaatgactaaaaaacactgcatcataatctaacattatgttgagtctttttgcctgaatgttttctaaacaattttgtagaagttagttaatactttaaataactagacattgtaactaagaaattattttgtaagttattcaggaaagtacacatagctcttataaaatgaccagtatttgttagtttcttttataaatctgaatgtttatataaagtttacctgaaataagatacatcttgctttcatatggaatatttcatgtttgtttccaatagccaaattaagaaatataatttcaaatataaaattaaagcttatgtaattttctttctttttttttttttttttctgagacggagtctttctgttgcccaggctagagtgcagtggcctgatctcggctcaccacaacctctgcctcccaggtccaagcgattctcctgcctcagcctcttaagtagctgggattacaggcatgcaccaccatgcctggctaatttttgtatttttagtagaggctgagtttcactatgttggccaggctggtctcaaattcctgagctcaggcaatctgcccgccttggcctcccaaagtgcaggaattacaggcgtgatccaccacacccagtcaagcttatgtcattttctaattctactctcctttctcaactcttagaatattttattgatatctgtgttcttaaactttacaaaagtgacatcatgcattaaatgctcctcttacttgcattttctactcaatgttctgattttgaaattcactcatgtttcataaatatacttctaattgttttattttcaaatattttataacaattgtataaccatagctcaacttattttccactcttgtcggctggccttttatgttgtttttatttactattgcaaacaatatttacaaaatatttaatgttcaagaattcctttaggatatataactagaaataattattattatgggatattctcatcttcatatttactttttattccaaattattttccaaaatagctccaagaatcagggtataggtgttcatatcctcaagaactctggatacagccacatttttaagtatttgccaacctgacaaacataaaataaaacctcattgtagttcttctttgtatttccctggttactgtgaagatgtgcatctccctgagttgattaaccatgtggtttacccatttgtaaattactggtctatgtttcttgcctatttttcttttgcgttatttccgtttctgttaactacttgtagaagttctttatgtagctggatactaatatttgttagacatatatcttacaattatctcttctactcagtggcctaaaatttcacattctttatggcatgtcgatgaagaagagagctgaattttaacaaaaccatatgtacccatttctcccattagagtgcttttcttacactttctttaagaaataatagaaaaagccggatgcagtggctcatgtctataatcccagcactttgggaggccgaggtgggcactttgggaatctgaggtcaggagttcgagaccagcctggccaacatgatgaaaccccgtctctactaaaaatacaaaaaattagccaggcatggtggtgggcacccataatcccagctacttgggaggcagagacaggagaatcgcttgaacccaggaggcagaggttgcaatgagccaaaatctcgctactacactccagcctgggcaacagagtgagactccgtttccaataaaaaaagaaataatagaaatgttattttgtgctttcctctatggattttgaaggtctgtgtttcattaggccttgaatccatctggaacaatttttatgtagggttaaagacagggatctaattttattttttcaatatgaataaacaattttaaatttctcataaatatctgacaacaggttgcatttatgtcaagtttacatatatacacagactttgctttaagtttttaaaaatttgttgcattattttaattggctgtgcctgtaccaaacctgctttaatcatgattcttgataggccaattgtctctgcattgttcttcaacaatgtcttggctattcttagaccttggctcttaaatacaaattttttccaccagttgctcaattacatttatatacacacacaaattattgggattatgattgaaaatggaattaatttatatactaagttattgattcttccagtctttgaatatggaatattcctttatgtgattcttctttaatattattcattaaagttttaaatttctcccaataagttcttgcatatattttgtgagattttgttttattacatcataaattctatttttaaaatattgtattttctcattagttattattggaaatataattgatttttgtatattgttcttatattgaataatcttttttaagctgtagacttttctaacaggtttgaaaatttatcagctccccatcttctctacaattcttaggataatgataatgattattattattatgttttactttctttttctaatgactaagaccccaacataatgttgactagaaacagtgattataagcatttctctttctgatgaaaaaaaaagattctaatattttgtgactaattctttgaaccttctattataatgaagttcttttactcttttacacatatataggggaattacaatttattcctatatagctcattttattgaaattattctttattatttctggtgccttttcttaatgtactatgttgcattaatttttaacattaaactatcttagtctaaacactccaagtataaaccaaacttgaataactcaagtttctaaaattaagaattcaagccacatgtgatggcttataactgtagtctcagtaacttgggaggccaaggtataaggattgcttgaacctaggaattcaagagcagcctaggcaacatagggagacacccatctttatcaaaaaaaaaaaaaagaaaagaaaaaagcctgatttagtagtgcacacctgcagtcttagctacttgggaggctgaagtggaaggatcacttgagcctgggaggttgatgctgcagtgagctataatcatgccactgcactccagccactccagcttgggtgacggagaggagcgagaccctgtctcaaaaaaaaaaaaaaaaaaaaaaaaaaaaaaaaagactacatctccaccaaaaaattggccaggcattgtggttcatgcctgtaatcccagcacgttgggtggctgaggcaggaggagttcaaaaccagcctaggcaacatagtgagaacctgtctcaaaaaaaactgttaaaaaaaaagaatgcaagaagatataatttgtatattacgataatcagaatatataatataactgaggcagtacaatgtaaattcaacaaaccataggcacagttctcttgtgaagccataattgacaaatattattggcaaatccatctttattggatcattcttatcagcatacaaatacattgtaatgattgcccttttaaaaatagaaaacgccatcacttttgatgaaagaaaatggcttgaaagaaaaatcgtttttttttcttcctactctcccttcgagactgatataatcagtctttctttcacatcagaccatggaaaccctcttggaaagatcatattacccatactttcgataaattcaataattaatttagtcctcattttacttaacattgaaataccacttaagtccgttgatgactctctttctgttgaaactgatcatgtggctttctctgattttcctcccgcctcctggtctacctagtcttggtctctttattggctcttctatttcccacaatttctcccacctcagtaaatggtaccatcatttgcctggataaatattcagtccaaaattctcacaataatccttgtttcatttttttttccccctgataggtctcatccaaaacatgaccagatctttctggctgtatctttacatgatagatttaaagtctattttaaaatatttaaaacaaattatattttttaatgtatttccacttctctgtcacctccactgccaccatccaaagtctaagtgaccatctcccattagctaaagtagtagtttacaagtcatctctgtgcttccactcttgccctgctactaattattgaccacacatgagccacaattacaactaaaagcataaatcattcaagtcacactactgcttaaatctctgctgtggctttccataacatgtaagataaaatctgaagactttaatatgccttacaagaaactacaatatctgttccctgcctttttgtcttatatcatttcctactcttttctctctttattgtattctggcaaaataatctgccagattattcctgcttcatggcctttccatttgccattagttcatcttagattactcttcccattgatcttcatatcattccgaaatttgctcaaatattaggatctcccttaccaatctgcctgaaatggtctctctcactcctcaatcattctccttccacttaccaagctttttttcacagaagatataagtaagtaaaataaacgtgttagatatttgtttgttttctgcttcccatgtttgaaactagactgtaagttgcctgagatgatggattttatatcgtgctcattgccgtacctctagaactcagataaatggtaagcatattatgagcaactagatatatcttttcaataaatgcatattgaagatgttcttgagtttgaagaaatgatttttaaaatatgaagtaatcttttatctccacaagttttctacacccacgcctacgatcgtgtgctagacctttcaacctatgctgcaatcttatagcccactattccagacctttccatttctgactcatccagatcctttatttccatttacagaatccctcttgtctccagggtgtgtgttctgagcaataagaaggataaaattgctcttatcaccttctccttcttcatgcgacacatccccattcatctgtcatggttcacgacaaatgctctgtcaccagcttgctccacagctttctcaagctgggttatatggaccttttatttggatacacaatatatctctgttttagcacttgtttctattttgtagtcttaagcttaatgtcctctaactgccactggaccataagctcatagaaaacaggaaagcaagtctttttcatctttgtgtccccagagcctggcactactggaccagatcaggaacttaataaatggcttgtggatgcatgaatgattaaattatattaccaacttatgacattttttatgtaataggctatacattgttgccattttaaaataatattttaaaaagtctaaaatagtatctgcatattgcccctccccacccaaaatgagtgccgtgctgtgagaaagacaataaaaattttatgcttggtttgccaccaagcataaccccactgagtcaaagagatgcagggtagtaaggtaaaaacagcacgcaacccagaattaggaaaacacatttctattattttgccactatctcttagtattgtttggtgtaacccacttttttctcctaagacttgatttcttattctctaatagaagaaagtcaagatgggtgccctccaagatcacattattttgatattatttgatagtcaaaaattttcacataagaatatagcttcctttaagtggtagggttgcttcctctggatacatgcttgtataagactgcaaagctttgagttttgaaaaaacagttcttattaatgctatagcatttaattggaaatcctagctcacatctttcttatagttagtgttcaagtgctgattgattgaatcaggataataccattaagacttctatgcccaaagaaaacagacaaaattattaagatacagttgctaagatgcagaagaaatttaaagatatagaaaatggaatttattcgttttattaagcaagccaaggcttatacgcaatataaaagatcttaagaatatgtcataggttactacctactgtgttgctatgagacctgcactagaaagatctaatgccacctgtgaaaagtaactatagtagaccataaggcagctaaggaattcagactacacattgtatgttggccacacccagtctagcaagatttatatatacattttaatttagaaagttcataatattccttttgtaaaacaaggatcatttcagagaaaatatgaaaaaaggtggaaaaaatctctctgattaacaaattgcacattaactggtacgatgacatggtttgaaaaacaaaaataatacttagctgcaaatacaggtgtataggacacatataaaaatttttcattagactcagctcatatacttttattaaaatgtgcataatgtgaacttcagactgtatatgaataacatagaaaagaatcaggaaacagctataaaatgtatatatatataataacagctattatatatataataacagctattatatatatataataacagctattatacacacacacacacacacacacacttatacgattaagaaactggttacattctggaaggaattgttttttgcttttttttcactggtcattttccagctttatcagtccctggccagagctccagccatgcaaggaattgagttcttgagaagtgaattacttgaggattacagatatgttgagaatatggggtcagtagtggaggcagcagagggatttttctaatgtgctcatgtcaacatgactacactggttaatcttgagggcccgttattgccagagacaggaacaggtctccagagtatgttccatacatgcccagtgtttcaaatataccattaaatcagcagtatttacaacaaaataaattgtgacaatttaaaaataggtgattacatgatgagacagatactaaattctcagtagttccacaagacattttcataacatagtaatccaaagacagtatttaaaaagcattagttaatccgtggcttatttgtgaaatgaaacttagaaatttaaaatttgctatatgcagtagtttctgtttgcattatatgcataaatgataacacatataaacacactaaatatgggaataagattcttaatttttctacttatgatactagcaaaggaaaatctgtagagtgtaaatacatgttttgttctagatggtggacacatgaaaaattgttcatatccatttgtcacttaagatttaatggctcttccactgccctgaagggtgagtcccggaccaggcagtattcatcacaaactgacttgagagccgtgggccttaagggaatattggagataggctagcaatattccctgtggcccgttgtggtgatgaccacagggtgacactccttttcctttggaaggagagagaagagtgggaagtgctgcatcttgtggcttgagtgacagctcagccacagtacaacagaacaggtggagttctgaggtttttgactctggtccctgattgctggaggatggcaactctggacctacctgggacctcgggtgactcgccaccctgaagggaaggacataggcctggctggctgtgctacctgatgattgtagaaccccagagccttgagcgaacataggcagcagccagggagtggttacagcaggtcttggggcaacacccagtcctgtgctggctttagatctgacccagcacaatcctagtggtggtggccaaggagtagttgtgtcactccacccctagctttcagtggctcagaacagagagagacactctatttgtgtgggaggaagaagaaagagaacaagagttttcgtccagtaatccataggattctttcagatcttgtccaaggccatcaaggtagtatgtctatgagtctgcaagaaacacagcattactgggcttggggtgccccctaaagctgttacagcttagatcacaatacccaagtccttctgaatatctggaaagctttgccaagaaggatggggacaaagaaggtgagaaggtgaagactacaataaatatctagctttttaatgcccagacatccaagaacatctactagtatcaacaccatccaggaaaacatgacttcaccaaatgagctaaataaggtaccaggaaccaatcctagtgaaacagagatatgtgacttttcagacagagaattcaaaatagctgttttaaggaaactcaaatttaagataaagcggagaaggtattcagaattctatcagataaatttaacaaagagattaaaataattatatattaattaaaaataactaatatatcatataattatatattttttaaattaattgaattaaaaagaatcaagcagaaattctggatttgaaaaaggtaattggcatactgaagaatgcatcagagtcttttaatagcataagagatcaaacagaagaattagtaagcttgaagacaggttatttgaaaatgcacagtcagtgaaaacaagaggaaataataatttttaaaaatgaagcacatctacaggatctagaaaatagcccccaaagggaaatctaagagttattggccataaagaggaggtagaaaaagagatggggtagacagttaattcaaaggtataataacaaaaccctagggaaagatatcaatatccaagtacaagaaggttataaaacactaagcagatttgacccaaagaagactagctcaaggcatttaataactccaaaaggtcaaggataaagaaaggattctaaaagcaacaagagaaaagaagcatatagcaggcaatggagcttcaatatgtctggtagcagacttttcagttgaaaccttacagaccaggagagaggggcatgacatatttacggtgctgaaagaaaaaaacttttaccctaaaatagtatatctggtgatgatatccttcaaatataaaggagaaataaagacttttctagacaaacagaagctgagggattttatcaacaccagacctgtcctatgagaaatgctaaagggagtacttcagtccacaagataaaggatgttaatgagcaataagaaatcacctgaaagtacaaactcactggtaatattaagtacacagaaaaacatggaatattataacacagtaactgaggtgtaaactacttcatcctaagtaaaaagactaaatgatgaaccaataaaaaataaaaagtacaacaatttttgaagacatagacagtacaataagatataaatagaaacaacaaaaagttaaaaagcagaaggatagaggtaaggcatagagtttttattattacttgtgcttatttgtttgtttatacaaacagtgttagttgttatcagcttaaaaaaatgtgttataagatagtatttggaagccccatggtaaccacaaaccaaaatcaaacaatggatacacacaaaataaaaagcaagaaactaaattataccaccagagaagatcaccttcactaaaggaggacaggaagaaagagaagacaaaaaaacaaccagaaaacaaataacaacatggcaagagtaacttcttacttatcaataataacattgaatgtaaatgaactaaactctgcaaacagaagacatacagtagctgaatagatgaaaaagaaaaaccatttgatctgttgcctacaaggaacacacttcacctataaagagacacatagactgaaaaataaagggatggaaaaagatatattccatgcaaatagaaaccaaaaaaagaaaaagagtagctacacttataacagacaaattagatttcatgacaaaaactataataagacacaaagaaggtcactatataatgataaaggtgtcatttcagcaagaggatataacagttttaaatacatatgcatttaacagtggagtaccgcgatatataaagcaaatattattagagctaaagagagagatgggccccaatacaataataactagagaattcaacacctcaccttcagcactggacagatcttctggacaggtaataaacaaaaaaacatcagacttaatcttctctttagactgaatgaatttaacgcatatttatagaacatttcatccaatggctacagatcacacattctttccctcagtatatggatgattctcaaggatagaccatatgttaggtcacaaaacaagacttaaaacattcaaaaaatgaaaataatattaagcatattctttgaccacaatggaataaaactagaaattgataacaagatgaatttttgaaactctacaaatactggaaaattaatatgctcctgaatgaccagtgggccaatgaataaattaagaaggaaattgaaaaatggcttgaaacaaatgatgatggaaacacaacataccaaaaaatctatgggatacgataaaagcagtactaagaggaaagtttatagctataactgtctacatcaaaaaagaagaaaaacttcaaataacctaatgatgcagcttaaagaactagaaaagcaagagcaaaccaaacttaaaattagtggaagaaagaaataataaagatcagagcataaataaataaaattgaagaaaacaatacaaaagaccaatgaaacaaaaatttggtttattgaaaagttaaacacagttgacaagcctttagccagactaggaaaaaaagatccaaataaataaaattggagatgaaaaaggagacattacaactgataccacagaaattaaaaggattattggtggctacaatgagcaactatatgccaataaattggtaaatctaggaaaaatagacaaattcttagacacatacaacctagcaagatttaaccaggaagaaatccaaaacctgaagatatgaatatccagtaacaagatcgaagctataataagaactctgtcaataagaaaagcacaggaactgaaggcggaaatctgaaagcctttcctcgaagatctggaacatgacaaggatgcctactttcaccactgttattcaacgtaatactgaaagtcctaagctagagcattcagacaaaagaacaaaataaagggcatccaaattggagtggaagaagtcatattatccttgtttgcagatgatatgatcttatatttggaaaaacctaaagactccacaaaaaaactattagaactgataaacaaattctgcaaagttgtagtatacaaaatcaacatacaaaaaccagtagcatttctatatgctaacaatgagcaatctgaaacaaaaaaatcaaaatgtaatcccatttacaatagccacagataaaattaaatacctgggaattaaccataaagtgaaagatctctataatgaaaaatataaaacactcatgaaagaaattgaggagaacaccaataagatgaaaaggtatttcatattcatgaattgaaataatcaatattgttaaaatgtccgtccttcccaaagtgatctatagattcagtgtaattcctatgaaaataccaatgacattcttcacagaaataaaaaaaaaaattttaaatttaaaattaaaatttatttggaaccacaaaagacccagaataaccagatctatcctgaacaaaaagaacaaaactggaggaatcacattacctaacttcaaattatgctacagagctagagtaaccaaaacagcatggtacagcataaaaacagacatgtagatcaatggaacagaatgtataacccagaaacaaatccacacagctacagcgaattcattttgacaaaggtgccaagaacatactcttaggaaaacagtctcttcaataaatggttctgggaaaactgaatgttcatatgcggaagaatgaaactagacttctgtctctcaacatatacaaaaagcaaatcaaaataaagacttaaagcaaagacctcaaaatatgaatctactacaagaaaacactggggaaactctccaggacattggtctgggcaaaaatttcttgagtaataccacacaagcataggcaaccaaagcaaaaatggataaatgtgatcagctcaagttaaaaaaaaaacttctgcacagcaaacaatcaacaaagtgaagagacaccccacataatgggagaaaatatttgcaaactacccatctgagatggtgttaataaccagaatattatataaggagctcaaaataactctataggaaaattttaataatatgtttcaataattggccaaagacttaaatagacatttctcaaaagaagacatacaaatggcaaacagacatgtgaaaaagtgctagacatcattgatcatcagaaaatgcaaatcaaaacaacaatgaaatatcatctcaccacagttaaaatggcttatatccaaaagacaggcagtaacaaatgctggtgaggatatggggaacaggaaatcctcatacactgttggtagaaatgtaaattagtacaaccactaagaagcattcagaacttccttgagaagctgaaaatagaactatcatatgatccagcaatcctactgatgggtatatacacaaaagaatggaaatcagtatacggaagaaatatctttactctcatgtttattgcagtactgttcacaatagccaagatttggaagcaaccaaagcatccatcaacagatgagtggataaagaaaatgtggtacatatacacaatggagtactattcagccataaaaagaatgagatacagtcatttgcaacaacatggatggaactagagatcattatgttaagtgaaataagccaggcacagaaagacaaacatcacatgttctcacttatttgggggatccaaaaatcaaaacaattgaactcatggacatagggtggaaggatggtttccagaggctgggaagggtagtgaggggttgcagggggaagtggggatggttaataagtacaaaaaatagaatagtaagacctactattaggtagcacatcagggttaccatagtcaataataacttaattgtacattttaaaataactaaaaagagtctaattggattgtttgtaacacaaagcataaatgcttgagtggatggatacctccttctctgtgatgtgatcattacacattgcatgcctgtatcaaagtatctcatgtaccccataaatatatatacctatgatgtacccacaaaaatttaaaatttaaaaatattgtatggttccaaaggagttattgcaatgtgtaatatacaagtgttacaaaataatttgtaaaatgcatcaacagtaactgttctatttcatcaaaatagagtttatatattattgtttgcatgtgctcacaattaccaaaaaattattttaaaatgtcaattaccaaagaaattgttttaaaatgtcatggcactggacttggtgggcaagatggcagataggagatagggctaatgtgcagttctcacctggatgaactgaactgtgtgtggagactcacactgtgatctgttgctccaagaaccaacaaaggaacataccaggaaaacctgaaggattcccagatcctttgaaagaagcagcacactactacaaatttcatgaaacaggtgaaaaactgagcattcccaaagtgtgagagaaggaaaacctgcctccaaacatacatttctactgggggacctgaaaatccagatcatgagattatggaagaaggatttaacctctcctggagttgaaatggatttagggagtcacatgaaatataaaagtagaagtagcagcagaaaatgccttgcaggcagtcccagtctccagctgaagcccagggaagccatctctgatgatatcttataggggcccttggggaaggcagccagaggaattgggaagtagtcacagtgcaaaggaaactctgaactgaaatttgtagttgtttcaactgggcacaaatcttctcaggtgaagtccaggagacaagcaggagtggctgcagattcgagcacaggagccgcagccaatggagtgggcagatgcaaaggagcaagggccatgcttgcttttttagtggggaagtctatgtcctcaggcaaggtcttattggggcactgtgggagtgagactggccttgccaattgcatgggggggtgggttaggcctctcactaatggctattccccacttctctggtgaactatatgacacagcagaggcagccaagatgtcttttggcctgagaaccaccctgcatccccacagtggctatagcaagccccagccaaggagaggctgagctcagacctgcataaccctgccctgacctgataggatttctttacccaccctagtagctgattacaaaagataaactcttgggagctttatggccctgcccatcacctgagaaactgaaatacttaccctggccaagttagggcaagcttagatccctccactaatactgcagctgttgctgtcttggaaacaccaccttctggttggaggccaaccaactcaggccattacagcaactcatggtagaataaccctgatcccaggaaggagaagacaacacctaattccactgcctacaagatactggctaaccagagttcctgagcgtgtccctgtgaaaacatcactgctagcataaccatcattcaagaaagccagcacactaaacatatctacaaccatggactctcacagagtctacctcacttcgctgccacctctaccagagcaggtgctggtatccatgattgagagacctgaagatggatcacatcataggactctgtagacattccccagcaccagtctagagcctggtagcccagcttggtaaccagacccaaaagagcaataacaatctctgcgttccagctctcaggaagccccatccctagggtaaggggggaagcaccacatcaagggatcaccctgtgggacaagaaaatctgaacagcagatgttgagtttcagacctctccactgaaataatctacgcaaacgagaaggaaccagaaaagtaattctggtaatgtaacaaaacaaggttctatagtatccccaaaagatcataccagctccccagcaatggatccaaaccaaaaagaaatctctgaatagccagataaaaaattcagaaggttgattattaaggtactcagataccagagaaaggtgaaaacaaacttaaagatattaaaacaaggtggggcatggtggctcacgcctgaaatcccagcactttgggaggctgaggcaggtggatcatgaggtcaggagttcaagaccagcctggccaacatagtgaaaccctgtctctactaaaaatacaaaaagtttggtgtgtggtgggcacctgtaatcccaggtacttgggaggctgaggcaggagaatggcttgaacctgggaggcggaggttgcagtgagccgagattgtgccattgcactccagcctgggggacagagcgagactctgtctcaaaaaaaaaaaaaaaaaaaaaaagatattaaaacaaaatacaggatatggatgaaaaattctccacataaatagatgtcataaagaaaaaacaatcacaacttttggaaatgaaagacacacttacggaaatacaaaaagtgtagtgtgggaagtttcaacaatagactagaacaagtaaaagaaagaattttggagctcaaagacaaggctttcaaattaagccaatcagacaaagacaagaaaaaaaaaagaataaaaaagtgaacacagcctccaagaaatttgggattatgttaaatggcaaacctaagtatagttggttttctggaggaagaagagaaatttaaaagtttggaaagcatatttgagggaatacttgaggaaaacttccctggccttgctagagatcaagatacccaaatacaagaagctcaaagaacacctgggaaattcattccaaaaagatcatcacctagcacatagtcattaggttatctaaagttaagacaaaggaaagaatcttaagagctgtgggacaaaagtatcagataacctataaaggaaaacctatcagattaatagcagaattatccatagaaaccttacaagacagaaagaattggggtgtcatctttagccttctgaaacaaaataattgtcagcccaggattttgtatccagtaaaatggagcttcataaatgaaggagagataaagtctttttcagacaaacaaatgctgagaaaatttgccacaactaagccagcgctataagaaatgctaaaaggggttctaaatcttgaaacacaccaaaatagaacctccttaaagcataaatgtcaccaggcctataaaacaataacacaattaaaacaaaacataaggtattaaggcaacaactagcatgatgaagaaaacagtacctcacatctcactgctaatgttgaacgtaaatggcctaaattctccaattaaaagatatagaatggcagaatggataaaaatccaccaacaaaatatctgctgtcttcaaaagactcacctaacacataaggactcacataaacttaaggtaaaggggtggaaaaagatattccatgcaaatggaaaccaaaagcaagcagcagtagctattcttctaccaggaaaaaacagactttaaagccaacagcagttaaaaaaaaaaaaaaaaaaagacaaagaggaacgttataaaatgataaaagaattactccaacagaaaaatatcacaattctaaatatatatgcacctaacactggagctcccaaatttataagggaattattaccagacctaagatgtgagatagatggcaacacaataatagtgggggggcttcaatactcctctgacagcactagatagttcatcaagacgagaagtcaacaaagaaataacggacataggccgaccgctgtggttcatggctgtaatcccagcactttgggaggctgaggtgggtggatcacctgaggttaggagttcaagaacagcctggccaatatggtaaaaccctgtctttactaaaaatgcaaaaaattagccaagcaacgtgatgggtgcctgtaatcccagctacctgggaggctgaggcaggagaatcacttaaaccccagaggcagaggttgcagtgagttgagattgcaccactgcactccagcctgggcaacaagagcaaaactctgtctcaaaaataataataataataataataataataataataataataatagacataaactatactctagaacaaatggatttaacagatagttacagaacgttctactcaacaactgcaggatatacattactttcttcaacacacagaacattctccaagatagaccatatgatagcttacaaaacaagtcttgataaacttaagaaaataaaaagtatatcaggtattctctcagaccacagtggaaaaaaagtggaaattaactccaaaaggaaccctcaaaactatacaaatacttggaaattaaatcacctgttccttaatgatcattgagtcaacaatgaaataaagataaaatttaaaaattgagctgattgatgatagtgacacaacttatcaaaacctctggcatacagcaaaagtggtgctgagaggaaaattcatagcattaaatgccctcatcaaaaagtctgaaagagcacaaataaaaaaatctaagattatacctcaagcaaatagaaaaacaagtacaaacaatatgcaaacccagcagaaaaaaagaaataacaaagatcagaacagaactaaatgaaatacaaacaaaaaaatacaaaagataaatgaaaaaaagtgggttctttgaaaagataaacataattgatagaccattagcaagaataaccaagaaaaaaagagagaagatccaaatgtcaattagaaacaaaacaggaaatattacaaccaataccacagaaatacaaaagatcattcaaggctactatgaacacatttacaaactagaaatctaatgtagatggataaattcctggaaatatacaaccttcctagattaaatcaggaagaaatagagattctaaactgaccaatgacaaatagcaaaattgaaacagtagtaaaaaaaaaaaaaaaaaaaaaaagccaacaaaaaagtccagaaccagacggattcgcagctgaattctaacggacattcaaagaagaatcgacaccaatcttactgaaactattccaaaagacagagaaggagggaattctccctaaatcattctgtgaagtcaatatcaccctaataccaaagccaggaaaggacataacagaaaaggaaaactacagaccaatactgctgatgaacatatatgcaaaaatcctcaacaaaatactagctaaccaaattcaacagcatatcaaaaagataatacaccattatcaagtgggtttcgtaccagggatgcagggatgatttaacatacacaaccaaataaatatgatgcatcacataaaataattaacaacagaagtcatatgagcatcccaatagatgcagaaaaagcatttgacaaagtccagcatccctttacgaataaaaccttctgcaaaattggcatagaagggatgtacctcaatgtaataaaaaccatctatgacaaacccacagccaacattatactgaatgggaaaaagttgaaagcattcatcctgagaactggaacaagagaaggatgcccacccccaccacctctatttaacatagtactggaactcctagctgtagcaatcagacaagagaaagaaataaagggcatcagaatctgtaaagaggaaattaaagttgtgctgttcacagatgatatgatcatatacctagaaaaccctaaagattcatccaaaaagctcctagatatgataaattaatttagtaaagtttcaggatataaaatcaatgtacacaattcagtagcactgctatacaccaacaacaaccaagctgagaaacaaatcaataactcaatcccttttacaacagcttcacaaagtaataataataataaaatacttaggactatacctaaccaaggaggtgaaagatctctacaaagttaactacaaaacactggtgaaagaaatcattaatgacacaaacaaatggaaacacaacccaatgctcatggatgggtagaatcaatactgtgaaaatgaccatactgccaaaatcaatctacagattgcaatttccatcaaagtaccatcaatattcttcacagaactataaaaaacaatcctaaagttcatatgaaaccaaaaacaagcctgcatagccaaagcaagacaaagctaaaagaacaaatctggaggcatcacgttaccctaattaaaactattctacaaggctatagagaccaaaacaggatggtactggtgtaaaaataggcaagtagaccaatggaacaaaatagagaatccagaaatatagccaaatatttaaagccaactgatcttcaacaaagcaaacaaaaacattaagtggggaaaggataccctattcaacaaatggtgctgggataattggcaagtcacatgtagaagtatgaagctgcatcctcatcgcttaacttatgtaaaaaatcaactcaagattgatcaaagacttaaatgtaagtcctgaaaccgtaaacattctagaaaataacatcaggaaagttcttctagacattgacataggcaaaaatttcatgacaaagcatccgaaagcaaatgcaccaaaaacaaagataaataaatgggacctaattaaactaaaagcttctgcacagcaaaagaaatagtcagcagagtaaacagacaacccacagtgggagaaaatctttgcacactatgtaggtgacaaagcactaatatccggaatccacaagaaactcaaacaaatcagcaacaaaaaaccaatcccatcaaaaagtgggaaaagagcatgagtagagaattctcaaaagaagatgtacaaatggacaacaaacatatgaaaacatgcccaatgtcactaattatcagggaaaggcaaatcaaaaccacaatgagataccacctgatatggtggttcggttgtgtccccacccaaatctcatcttgaattgtagttcccatgatccccaacccagtgttgcgggagggaccaggtagagataattggataatgggggtggtttccctaatcctgttgtgatagtaagttagttctcacgagatctgatggttttataaggggcttttctgcctttgcgttgctctcattctctcttgctgccctgtaaagaggtgccttccaccatggctgttaagtttcctgatgcctcctcagccatgtgaaactaagagtcaattaaaactctttcctttataaattacccagtctcaggtatttcttcatagcaatgtgagaacagactaatacagtaaattggtactgggtagtggggtgctgctgtaaagatatccaaaaatatggaagcaactttggaactgggtaacaggaagagactggaacagtttggagggctcagaataagacaagaaaatgtgggaaagtttggagacttgttgaatggttttgaccaaaatgctgatagtgatatggacaatgaagtctagtctgaggtggtctcatatgaagatgaggaacttattgggaactggagtaaaagtgactcttgctatgcaaagagactggtggcattttgtccctgcctcattcaagaggaagcagagcataaaagtttggaaaatttgcagcctgacaatgaggtagaaaagaaaactccgttttctggtgagaaattcaaacaggctgcagaaatttgcacaagcagcccatcccatcacaggcccagaggcctaggagggaaaaatcttttgtgtgttaggcccttgggacatggtgcccagcatcccaactgcttcagcgccagccttggctaaaaggggtcaaggaacagctcaagccattgcttcagaggatgcaagccccaatccatggtgactttcacatgatgttgggcctgtgggtacacagaagtcaaaaaccaaggttggagaacctccacctagatttcagaggatgtatggaaatgcctggatgtctaaacagaagtttgctttgctacaggggtcaagctctcatagagatcctctgctagggcagtgcagacgagatatgtggggttggagcccccacacaagactttggacttgagcctttgggttaatgctggaataagctaagactttgaagaccattggaaaggcatgattgtgttttgaattgtgaggtcatgagatttgggaggggccaggagaagaatggtatgccttggctatgtccccacccaaatctcatcctgaattataggtcccataatcctatgcgaggaccagatggagttaattgaatcatggaggcagtttccccacatcttgttgttgtgataataagttagttctcataaggtctgatggttttatagggagcttttcctcctttgctcaactctcattctctctcccgccaccctgtgaagaggtgccttctgccatgattgtaagtttcctgaggcctccccagcaatgtggaaatgtgagtcaattaaacttctttccttcataaattacccagtcttaggtatttattcatagcaacatgagcatggactaatacattaccttattcctgcaagaatggccataattaaaaaatcaaaaaataacaggtggcatggatgtggtgaaaagggaacacttctacactgctggtgggaatataagctagtacaagcactatggaaaacagtatggagattccctaaagaactaaaggtagagctaccatttgatccagcaatcccactactgggtatctacccagaggaaaagaagtcattatatgaaaaagatacttgcacacacatttttacagcaacagtatttgcaattgcaacaatatggaaccagcctaaaagtccatcaaccaatgagtggataaagagaatgtggtatatatacaccatggaatactactcgtcataaaaagaatgaaataatggcattggcagcaacctggatggagttggagactattattctaagtaaaataactcagcaatggaaaaccaaatattgtatgttctcacttgtaagtgggagctaatctatgaagacataaaagcataacaatgatataatggactttggggacttggcggggaagggatggggtgagggataaaagactacgtattgggtacagtgtacactgctcaggtgatgggtgcaccaaaatctcagaaatcaccactaaagaactttatgtaaccaaaaaccacctgtaccccccaaaatactgaaatgaaataaaaatttaaacattgtgctttctcagaaaaaaaatgacaagacgctgtaaaaatttttaattattttataaaatagatacatacgtgcatgtgtatttcttttcaaatctttccaaaatataattttattgaagaatagtatatcaataaataagttacagcatgctacttttctgctcaaaatcctccaatgccaacagttgcttgttttcctttgactacaagccagatctcttactatgacacagcagactgctggtcatgctcgtcccatgcccaaccatttctaactcccgcttcttcctattcttccttctgtcactcagtggactctttgtatacctgaatgatgccgggaaaattccagaattagaacatttgcatttgtatttcttctgtctggaatattttccccaggcattcacatggcttgctggataactaccttacacattcaaatgttattttctcagtgaagccttttgcagcttttgctgtatttgaaaaggcaatccccattcacagggtctatacttcccttccttgatgtagcttttctcccagccattatcactggcaaactatatatatatatatatgtttaattttaattattttgcttacgatctgtttttccgccactagaatggaagaatataagctccaaaactttttttttttaatcgaatttttaaaactaactttgagacagggtcttgctgtgttgcccaggctgatcttgaattcgtgggttcaagtgatcctcctatctcggcttcccaaagtgctgggattacaggcatgagccaccacaccctgcccaagctccaaaaatgtataaatgcttattgcactgtggtttccttagatacattccctagatctgtatctgtcatatcgtaagcactcaataatatttgttgaatgcatgggtgtgttacaaaacaaacatataacagataatgcataggggtttgatagagaaatgtttgtggtgagaggggcagaagtagagtttagggctgagaagtcactaggaacaaatcagtagagactcttcaatctcagcaaataggtaatatttttaaagttaatgaagttgtgtaagatagagactgtaaatgggtgaccatttggttttatttgcttaaattaatgcttgcctttatgaccattatattgaaaagacgtttatgaccctttaaagaagacatcaggtttgaaggctattccatcatgagtcaaagaaagatttggagtactactgcaggacaaggctcttgatagagatttgtgagaaaaaaaataaaaaatggaagcagtgtcagacactagaaagttttatgccagaggctgactgtaacagaaaagatcaaaaccaatctaatttaattaatgtatctttaattaggtgaaggtaaatctgcaggtctggacacaaatgacaaacagtttatcatcagaatcatgtcagaaagtgacagaattactaaaatatgatgtggcttctttgcttatcagaagaactaaaggaaggcagttacaaagaggctaaaggtaaaactggaatatatttattctacagaaaatatattaccatgggggacactgtaactgaacttttctgattgattcaagaagagcaaactggaaagtgctctagcagagagggatgttgttatagatgaaaggggtttagagcctagaagatgaagtcacttgtctagagtctcacaggatagtcctgaccaagccagaactgggaccaaaatgactttaaactgttcctagattgagtagcttggatctatttaacttttacttttttatttttttattttcctttaagttcttggatacatgtgcagaacgtgcaggtttgttacatagatatacatgtgccatggtggtttgccgcacctatcaacctgtcatctaggttctaagccctgcatgcatcaggtatttgtcctaatgctctccctcccatttaccctgcaccccccaacaagccctggtgtgtgatattctcctttctgtgtccatgtgttctcatttttcaactcccactcatgagtgagaacattaactttcgttaattcctctttctactcaactaatatttctgaagccctactatgtgccaattattgtgcaatctctgctttcttaacttttaatgtggggggacagactttaaaaaaataaaatgtgtgcaagtaaaggggagatgaatgctagggagaaaattaaagcaggaagaggaggcagagagcagctgtagaataggaaaggaaaggctggcactggaagagaagaaggagtgggtcctgagggtgccgaggaaagacaaaggaagcagcaggtgcagaggcactaaggagggaccctgctgatgtgtttgaggaatgaaaggtccatatggctggtgccaaaggagcaaggagggaggattgacatgtgagggcatagaggcggggaggagccaggtcacggagggacttcagctgttttaaggacttgacttctactggaacaagacccgctgccattgaaggctttgagcagagtatcagaatctcacttatatttgaaaaacctcaccctgactcccgtgttgagtgtagatgtgaggaggcaagggtggaaagcagcagactggttaggaatcaggatggctttaaccctagtagtggtggtgggttggcaggaggcgtgttcaaattttggaaatacactgaaggtagagcagagaggattcatgggcaggcttgatgatgaatgcagaagaaagagaggcattaatggtgactcctgggttttgtcttgagcacctgaaagaatggagttgccatgtaccaaaataagaccaaatgaggaggaagttcaataagtctcttttaatctacagcacgctctctcttgcgctctgtctctctctcaccacttctttcctctctacccacttcctttgcaatttatcagttgataaaactatattggtctatagagtttcccacgggcagggatttcatggagtatttccctgtgtgctatttaatatgttcctctctcccttataaattctggaaatccagaatttaggtctatagacttggtcaaattcatgcttgatttttatcaatagtacattacgtgtaacattgattgtgtattttcatccaaaggtgcatcatgtgtggtttcacttgtggttatattagcagccattgataatcattgcttagatcctactaaatttgtcagaagttaggaaatcatgatactctaatcccaccatttagtcttcttttatgagctgaaatatctccataaagacaatatttggtttcattaaggttcctataacaaagaaaggccaaaggcttgattcttctctttattcgccaatattcaaaataatgagttggttacctagcatcttccaaaattaaacatttttaacaattttaataaaattaaggatttaaatatatttgatatgcctcaatccattgcagaatattcttgttgatgttcagattggcccatctttggccctgggtgtttttgaactgccctcagtctctaattgcttctttttttctactgggatatgttcctggctcatctttcatcttgcacatttccagccgtagaagccatcatttctccagggatcctagttttatcttagaggaaatggtatttagtgatcacagtctggtgcacgaggtcagtccttgtgtaggagctttttcagtgcacagaggcaagacatatgccacatttaaaattagataacattatcttaggttcttagagatgcttctaactaaaatttaaaagtatatggagcttttatttaaccttatctattttatatctgcttcttttctcgcagtgaaattttcagggtcaaaatcaccaagataattagtcacttgctttattccacatgtacagaacatttcaatagcagagaatgcaatgtctaattttgcctaaaaggtcagtgtgaagagaacatttgttgacaagatgaggatacatattctgatgagagcaaacaccatgtaggaagactcagaggcttgaaagagagcatagttcatttaggaaagagaaaatcctgttccaccagaggaatgatggatgacaaagtcagcaagaagttgggacataatgagcctgatattcaatgctgcagatgttagagcaccaacaagatacaaaagctttttttttttttctttttttgccttgctttcaggaggtatcttgcatttgttttcaataaaaatattactttcctactttgtcctcataagcagaacttagggatgagcaaagagcagggggttttaaggattgctctccttaacactgttctacaccagctcagtaaaaagaccatttaagtgtggctcaattattttctgacatttggagaagcatttgcatactaatgatccagggtcctggttgtttttctccccacagaggacaaagtgtggaccatagtgtctcatgacttgcagatgcagacgcctgtggtcggctacaacccagaaaaatactcagtgacacagctcgtttacagcgcctccatggaccagataagtgccatcactgacagtgccgagtactgcgagcagtatgtctcctatttctgcaagatgtcaagattgttgaacaccccaggtaggctgagaatggaatgttacttttaatcactatctcagctggtgcttagaattgcctaaagaatccaacaggtgtggttcattatcttatagtctagtcttcagtaggaaggaagctgtaaataagtaaaataaaatcattgggcttgttttctggggaatgaagctaagaaagaatgattttgaggaaaaaatagtccattgttttaaacttacggatttttaaattgtatgtgcatatatgtttctagtgcttaactgtcagtagtggctgtgggacaaagtttatcagagctccttgtgaacattcaagcaattccctttgagagcttcaggtgtctttattgtaaagatgaaagcattctaaaaattgtctacagccaaataggatatagaatagcgatagaatttagagctctttcttcccagtagttgcttcacagtacctgtttgtctcaagaagtctagcctgattttttgttttcatgatggccaacttttagcatgtgctagtgtgtgtgtgagtgtgcacatgcaaacacacatacatgtgtgcaagactgtgtccgggtgtagagaacagagagattccaaaagatatactggaaataactttactgcaacaagttccatatgctctgggagtcttggcagtaaattcgagatgttgtcagaaaactgcatctctgtgtctgtagtaaaacacagtggaaataagtcaaagaaacatgagctcataatttccaaccttaccacttcccaagtatgtgactttggtggagtgagttgacctctttttaaaattttaccttaattgacaaaattgtatatgtctttcgtgtacaatatgatatgatatatatatatatatagtgcaatggctaaatcaaactaacatatgccttgcctcatacatttattattttttgtgaagcaaatacttaaaatccatgcttagcagttttcgagatataataaatacattgctattaaccgtagtcaccatgttatacaatagaccttttgatattaagcctcagtttccagcgactttttctgtcaaggagaaattataatgcctacttcagggtgattgggagaatttcataaggtaatatactaggtacttataagacttgatacacttaaggacatgataagtagcaagtagtatattgattttttaaaatcatgttaagcaactttgtgctatgtcagagaccaatgggctgttggatgccccaaaacagcaatgaattgaaagcaatgttgtagggagcagtttacagagaagagttataagcaaacagtgataaggctccgatgactgaaggaacaccaaggttcttaatctcacgcagaactggataaaacgacatggacatacgtggagtggttttaaggagaggagagtttaacaggcaagaaagaaggaaggaggaaaaaaacagctccctcatacagagacagagagaggaagggattccaatgagagaaaaccctgtgtgtggtggtaaagtggctgcttatatgaggaggctggaggaggtggtacctgacttgcatagggctcagggaattggtttgaccgggcacgttattcacgtagcccagggggaaaactggccctcccaccctagccttttaatatgcaaaggcagggcgccatgatgctctacccacatggagatatgtgggggcggccatgttgccaggcacatgtgagggcaaggaagaacagggcaggaatcgccatgtttgggtggacccagtttctaatggccggtatttgcacatcaaagcttgccggcctggctctaagagcgggggctttcctgctagacaagaaacattttggagctgctttaaaagaccccttttcccctctatgtgtctaaaataatttcttaataatttcttaataacttctataacgatagtacacaatattgtgaaaatgtgagtgctttctatgtgcaaagccttgtgctagaattatagacagagtaccctctaagaaataaggttggaaaggagggtgggagtaaactgggaaggaaagtaaatgctgtgctgtggagttgggacttcatccagagggccagtacttctcagactttagtgggcattacaatacctggtgagataataaaacctgctttgctgggctccatttcctgagtttctgattcagtaggtctcaggtggtgcttgagaatttgcatttataatgagtgctatggactgaattatgttcccccaaattcctgtgttaaacccctaacacccaatgtgactatatttggagatttggctttcagtaagtaattaagattaaatgaggtagatcataatggtggggtcctagtccaataggattggtggcctcaggagaagaaacagagctctgtcatgtgagggcatagcaaaaaggcagccacctgtaagccaggaagagagccctcaccagaaacagaatcagccaaaaccttgatctttcacttcccagcctccagaactgtgagaaaataaatttctgtcattgaagccactcaatctatggtattttgttatggaagcctgagcagatgaatacaatggggttccaagtgatgctgatattcctgctctagagaccatgctgagaaccagcacaactcttttttctgttcactttcacttatcataggtgtgtgtgtgtgcgtgtgtgtgtgtgtgtgtgttttaactggattctgtttccagtgccaggaaaagtcaaagactgtatgtagaagaccaagggcaataagagccactaatgaacctcatcagcttgtcttcactgtttcatgagcggctgctccttattgaagcccttttcacagattccagttaattagtcttcagtcctggggtaggggtggaggtggggacaaattcctgaccagcaaaagaaccttggtactctcagctttatgttctttattttctttctttcttgtattaaactccaaagtcagctttcagtttttgaattttgctctggtaattaaaaaacacagtatggcttccaaatatgttcaacttacggttgaggtaccaggagaattagactagaggtgggaaaatagttcacctttagtgctcctggtcttgcagttcagcatctttctttccccctcattgacattccttgtctcttcccctcggccaccgtgaagcctcacacacataaccactctcctttacaaaacataaaatgtacaaaacatcaggaaaaatgggataaacttgttattaagcactctgttagttgcatttcctaataatgagatgaagacatttttctttaacctctagatacccctttcacgagaaaaactgctaaattgaaatcaagagtaaacttttaatctgaacagtaaatatatcactttctttgtatttctagacatctagacactgggtttcccatcatttgtagattattattgtacataataaataatacttcaaaaatcagtttctcataagcttcttgcctgtttggacattctatatatatatcaaatctttggttcacataggatttgtacttaacaaatgtttgctgattcaaatgaaatgaataatatatagctttaagtgttacctcacccaaccttggggcagtggtttaagcaggagtgtgcatcaaaatttttaggttgcttgtcaaaatgtggattgaatggccttactcccaggctttgatagagcttggttggggcctcagaatatttgcttttaacaaacacccatgggtaattctgtgaatcacacattgagaaacactgtctttaatttatggcatgaaggtttctcatgttggaatttaaggtgttagtccttcatgtgggagaagattaaagggaatattagggcttgtctgacccattgaaataaaatggcatacatagttacctccttcagctaaaataaattggcataataaaaattttaaatccttctgatataccagtctctaaatatcgtaaagtgaatttcagcttacccttctgagtcattttttacactcccaattttcattttccaggcctactaatctgcagaatagctgacgcaaggaaaaggagtggttgagacagcaagttccttgtattgttatattttgcatatgtcaaaacaagaaagaacacaatttaataaaaatctttaatttgtgttttaaagaagctaatgtttactgtaattgatttttttttcctccttcatggtaacattcaattttaaatatccatttacttattcttaactaagactgaaattatattagaacttctgtagtagtacttgtgacatctgttcaaatacaaagtatattcattatagtgattgcaattaaaatgaatatcaaatgagtttgtaatagctttgcgcttaaaatgttattttttattttaagagctttacgctcaagagttcatttggggctctatagtttctaatgatacttatgataaagagttgatattcatatggacctcatttttattttgataaatattcttttataccataccattagctagtaaatgtaaaattacccattattagtatcttccaatttttacaaggatagtaatacatgccttgtaatgtgctctcttttattactacaaaacttaaaaatggaaacaaattaaaaataatgattttgccagtatttatggtcatgtccattctcgcaatgtaactgttacttcagttgtcctcagctttacaaaatacacagaaatggaaaaataaaaagttattttattttacgtagaaaagcctgcttagaatgaggcataccaatttgggaatcaccaaattagttctacccaaacagagaaaaatcattaatggtcatccaaatggatgtctacatgatttatatttatatccccggatttgtaaatgtaatattaccttaacttatgaagggctaaattagtgaacagtgaaatctacttctcaaataagtaccataagaacttgaatttggccgggtggggtggttcaggcctgtaatcccagcactttgggaggccaaggcaggtggatcacttgaagtcaggagttcaagaccagcctggccaacatggtgaaaacccgtctctactaaaaatacagaaaattagctgggtgtggtggcatgcacctgtaatcccagctacttgagaggctgacacaggaaaatcacttgaactcgggaggcagaggttgcagtgagctggtatcatgccactgcactccaacctgggcgatagagcgagactctgtcgcaaaacaaacaaacaaaacaaaacaaatcttgaattagataaatcaagcactgagggagttcccttagagcctacttgagtagtcttagtcaacaatactaatacttttagataaccaaaatgtttctctgtatttggacaagaactattatgctgccattaaaatgtttatttgtgtatcttacatacattgtagtcatatatttattttacaaatcatattacactttctagttaagaatttttttgctgaagtattgattccttacatatatatttatttaattgtagagataaaaagttatcttccctatttttctggctatatttagccctgttttgttggtttccagtgtttttcctcttttaatttttcagtgttggctagttttcatgaatgatactttttactgcttcttttgttgaaagaagcaatataaattatatatatttttggatagtttactattagattttgtatctattgaaattgaattatgcttacaatttttgcctataaagtaagctgtgtaaaattcagcatactttatgatactaaactgtgatttagtggctttgaaaagacaagaaaacatgactctggcattgtaacatataatctatttttagcaagaaattctaaactttggtgcggctatcaagcaaatgaatttcaagttatgctgtgcattataagaagctgcagcatttaactcttaagacgacatggataaatcaattccaataaaagatttttcagtaaataaaatttattgtgactaatcagtgtattaatcagaagattatttacttaattattatacccactcattgtattaaaattgggtgatataattaaatgagacaagcaacgaggatagtaataactaaagggtaaaattagaaaattgtatcgagtaatgtttcatactcagacaactagcatctgcatgatgggcactgtaattgaaggggacagagggattgcagggagaagagtaagcaactatttcaacaatatggataggagttgatgagaacctcaactggaataatgagtaggagaataagtcaacaaatattttttagttttgcctgtgtatcaggaagtgtgacatataagctgatatgggaaagattcatatgagttaactaagaaaaaaatgagagaaggattctgggttagcgatgtcagcatattcaatgattcagagatggagatcaagagacactaatttgaaggaagtgagaggcgtcagaatggctggagtagtgaacttgaaggtgggagaggcagaaaaatggaaaccggaaattaattcagagtctctacctaatgttgaggattttatttgaatggcaaacagaatgatttcaagtagggaagttctggctgttccatggatactggagtggaggaagcagaggtggtgggaagagtctgtccgcaccagagtgcacatggactgcatgtctgggaggccagctgggacttgagagaaagtttgttgttgttgttgttgctgttattgtttttaagtttagatgctggaatcaacaggagttgtgattacttatatatacaggaggaagaaaattcaagggtgactcaagtttctgacttgaaaaactggccaacagttctaaggcttaccttgtttattaagaaaaaactggagaattggtggtcacttagctttaacatgcaaagtgatggcactaggaatacaggtttttatgtgatctgtgatggctgatggcatagtgtaaaatccttttaactgacatcaaaagattaatgaattaaattttttcttccttgaaattttcttaaacatactctacaactaaaataaaatggaagaactaagagtatcatcagaatcctaatgttttccattcttgtatttatattgaaagatcagaaaacatatagtcaagactgacctatctcaattatgtaccaattttttttttcctcatgcaaagcctcctgtattgcttcagcttcctgggctgccttggtttcatggcacctgcatgatgtctgaagcaagggaggagcaggctgcaaacctaagcgcagacaattaaatactcctgcaaggaagtaacacgttgtgtgtgtgtacattttatggaccaaagcaagtcacatgttttgctgggcctaactttagaagaggacaaagtacaatcttcccatgtactcaggagcaaagatcacgtggacttattgaatagttgtaatgccttcttaagatgactcagagaggtaatgggaggagaaagaaaagaacgcagaagaaaagaaaaatactaattttgtttatttgtttgtggatggaatgttattatgttcactttttttttttttttgagacggaatctcactctgtcaccaggctggagtgcagtggcatgatctaggctcactgcaacctcagcctcctgggttcaagtgattcgtgattctcctgcctcagcctcctgagtagctgggactacaggcgcatgctgccacgcccagctaattttttttcttttttttttgtattttagtagagacagggtttcaccatgttgcccagactggtctagaactcctgagctcaggcaatctgcccgccttggcctcccaaagtgttaggattacaggcgtgagccaccgcgcccggccagttcacttttttttttttaacgagggtcagagataaagagagactccactcaaaggccaatttcaatgtaagaggacacccttcttttacagattaactggtaagcaaaaaaataaaataaaaaataaaaatactggtactacaattatttgcttccttatgaaactttctacaattcttacccacggtgatcaccattttttctgaatttctgtttcacttagggcctaacctctatcacttagcagttgattatgggctattcatggcttttcttgctcttcattgttttctggtgttttaatgggctctttcttacaataacacaaggtctttgaggacaggggccatatcttagtatcttccatcatgcccagcttctagacatctacctagatagtgaataaattagaaaaacactaattttaaaaggggactaaagaagaggatgcagctagctaaaggaactgaaaagttattaaacagtaggaagaaagaatcagattaggaaagtcctataattgggaagctaagggagatgggtatttaacaataaacaggcaagcaagtaaaaaaataagcaaaagcaagaaaattgaggtatggtgaatggtgagacatcctagagaggaagccatcccctgtcattatctgttgggaggctgctggagtttcatgtcagtggagtttggtggattgagccactgaagactgcatggggaaaggaaagagcaggggtaagttttcaaaaggttgatggtacgaggatggctacatgtagaaaagctgcttaatcagatgacaaagcaagagtaggggtttaaaaatgtttgatatttttagggatgaggagttgtaagtaaatttataaactgagaaggagacattggagaggttcagattaaagatgtaagacagaaaaggaataataggtcccaggagagaaagaagagtgtagaatttgctttggtaaagaacaaggacacctgtttcaagaagggagctaaagacaagggcagaagttctcattaaatgtcttgaacaataccattctagacatttatctcatttaactctcaaagttacgcaaagtagattttattatctctgttttgcaaaataggactcagaggaataaacttactgaaggctaccatattagttcattttcacgctgctgataaagacatacctgagactgggcaatttacaaaagaaagagttttaatggactcacagttccacatggctgaggaggcctcacaatcatgatggaaagtgaaagacatgtctcacatggcggcagacaagagagcttgctcagagaaactcgcctttataaaaccatcagatcttgtgagacttattcactatcatgagagtagcacaggaaagacctgcccccgtgattcaattacctcccaccaggtccctcccacaacacgtgggaattgtgggagctacagttcaagatgagatttgggtgtggacacagccaaaccatatcagccatcattgctggaagtggaaaaactgagtttcaaatgtatatctatcctattaaaaacctttctgacacactgaagaaactgtgaacatggagaagtcaatgcttggccaccaaagtgagtatagaactaatcccggcaggaattgtacccaccctcatctcttcaaccactatgaaagaacgttttccctcttgtcattttcttttttgtgtgcatgattagaaatgctatttaccaagtgacctttggtcagttccagtatttctgattaataaattaatcttaaggtaaattttattaagggtagctcgagttgtactaaaagggtactgctagtgcctttcaagtggcagacttgagctttgaggtgagactttgattttgtatgtagcttagtctttaaaataacaaatataaggatgaaatggaaactctgtgaggttatccagtcactctgtagagcttgaaaatctgccttctcatgtctttctgtttaaggtagactctaaccttttgattctgaaaagccatgttcaaataaatacttattctagtatagaataatcataaagcaaagtgaaaatgcaaagactgcatgagaattatgggtttcatgtttatttctccttgtagttatctggctatatgttttcttaagttttcagacgggataccacactgctgttaatcttttttaaacaaagattatatattaaaatgagagcaacttagaaattacaccaaagctgaattttctttgaagatgatcacatcttaatgaacggatttgtcctaatttatgagaagtatgagtttatagagttgcatttaaactaaacttcaatatattaaaagaccataaagccaagtttttaaaatttgcattttagtttattatattataaaagattgtaaaaatgaagaaacggctattatccaattcaaaaaattaaaaaactacttttggactatttttcaaaattccatactacttactctgccattctgaataaaaaaagggataatcataaaaagtcttctaaaaagattggatagataaaaaaaaatgtactttaaactttgtgaaggataaaataatgtaacaaaatttaaggagaaaatttttaaaaagtactgacaattttattatttatctttatgaatattactctctagtttttgcttccatctgtacatactttcacagaaacaaaactggaatgaagttaatctgatagtcttttctactgacattaaatcgtaattttttccagttcatatattttccttaaaattatccactttaattacatcgtaaaatgaagataaacttaattcatcacctgataaacctaatcgtaaattatttttgaaaatacctcccctaaacaagatactgaaaaaaagcatcagagttttacaataaacttctcttggaaatacctaaagtattactaagatattgctcagttattcattctgcaaacatttattgagtataaaatatttagctgggtgctatgagaatacaatgagggtaaaaataatacagttgacccttcaacaacatgagtttaaactgtgagggtctgcttacatgtggatttcttctgtctctaccacctctgagacagcaagaccaacccctcctcttcctcctcctcctcagcctactcaacatgaagatatgaggatgaagacttttataatgacccacttatgcttcatgattagtaaacgtatgttctcttccttttaattttcttaataacattttcttttctctagcttactttattgtaaggatacagaatataatatatataacatataaaatgtgtgttaattggctgtttatgttatctgtaaggtttctagtcaacagtaggctattggtagttaagtttgtggggagtcaaagatgtaggtcaatttttactgcacagggggttggtgccccaacccctgagttgtttactggacttttaaatagcatttgccttaaaatatagagtgaaattttttttatgatgacaataaaatcattttgtataagacttataaatactgaaaaaatcttaactagtatgtccatcatggataaaagactgaataaatttagaattcataatgacttccaaacattttgatatgtgtattttgcattaggtaattctgcctcccctgtttgaagaggttatatttggaggaaagatgaggaaggcttaggaatgggagaaaatagggtctcagagtactattagctgggatatcagttcaggttcaaccggagaaacagaacaagtagaagatatatttagagatttattgcaaggaattggcttatgcaacagcggggcctggcaaggcaagtcggaagctggggcacactatcaggaaggaaaggctggaactgccagacacaaactgaagctgatgtccacaggaggtagttcttcttcaaggaagtctcagctctattcttaaggcctttcaactgattgaatcaggcccatccagattatctagaatatgctcttttacttaaactgtaattacatttacaaaatgcctatgcagcaacacctggaagagtgtttttttgaataactggaccccgtagctaagttgacagataaaaccgaccatcacagtcaacaaagatgacttttaatatgaactactgataaatctatttctagaatagcaatgatttattccctcatttgtatcacatatgcctctctaggtcagcatagtcaggtgagatccacctattacaggtatggagggatcttccattgtcctatcttttcatttctaatgaagatacagtttggttgagtgtcaaattgccaaacaaagttagaacaatggcaatttgagagaatcaagtagatcaactcagggagataagtcaaaagacaaagactccttttctctgtgttgtttcagaaaagttggctcagaaaagatggcttcattccacattttaatgaatatggcatgtgtccattaactcctcattctcttatctaaagggaagcacctccattgagccaaatacaaacatcctctttctacaaccttcggaaagctgcaatgtagccctatcttgccatcaacattcctctgcaatgttttctaacttacagttgaatcaagttccactaccatgcatcataaaggtaatgttaaagatgctcagagaaatacggttgaagaaactcatccttacagaagcacctatgaataaaataatccataaattttatttcagagactgtatctttcccgagctagtattttcccaccaatgaatgataagacttctctgaaatactagtaacactgatggaagttggattctattacctattgtttgcttacaatttaccaacaccagtggctgggtaaatagtttttataggacaatgaataatgttgcagagtgttagctgactaggaatgccacagccattatgaccttcatcccgtatcttaaaatctctataaaaacatgctcaggtattttttctctcttggtattggacctgaaattcaggcttaaaaatatattgtcatctatatatctagataactaatgcttaataattatctccaaattagatcatgatataaatgaagggagaggaaatagcagtagtatttattaaaggttcacctgggcattttatatatattggctcattccgccccaaatctctgtgagttgtatatcggaatttctattttatatctgaggaaacataactttagaagggttaattaattcacccaaggaaaaacagtaaataccgtgctgagagtccaaaccaagattaaaatctaggtttatgtacctctagactctatatattttctacctcaagaagttagaaaggaaggaaggggggaagaaaggaaagagaaagaaaggaagggagggaaaggaaggaagaaagagaatgaggcaacctaataagttaatcagttggggaatttttaatttcttatattgaaacattaatatgggcttccagcatagttaaagacccaaactttatttttttgttgttttgttaagtagtaggccaaaagagacatttataagagctgcacaaacttctttctgaaaaatcctacctttttatgttttttcaatatccactattggccctgacaagtatattaaaaaatatggtttatataacaatttgtttgaaatgatattgaaaaacatttgatgtgaaagaaacgaaaaaaacatgcctctctctacagagcatttgactttcatgtttttaatatcaaggtatttcaaatagaacatatgaattgtatattgattaaatagaaaaatgctgtaaaaggttatccccttcttttcagacataagatatggaaacgaaatgttgatgttttctttctttcttcttcttcttctttttttgatcttttcagaagaaactcttatgtctaagcctaacacaagtgacacatccagtgtttcattcttaccttataaatttgcttttgatagagttctccgagatcctgttaaaacgagaaagatcagaaatcaccagcttggcagagcccggtgggcagcacctggggggatgaacagcaggacactgatacagacatgaaattcaactatcagagatattgagacttactccattagggtagggacttgcttcctgtcaaaaacaaacaaacaaaaatatgaaatcaccctcagttcgattttgtaagtaggagggagagcagactagaggaagaggcactaggggaggaaccacgctgaggagcagaaaggagggcactgggtgtataagcagaggggagggaggtcctgcgcaggaaggcaaggccctggtggacagcaacagcaactagaacaaacagtccactctgcaggtctgttcagccagcctgttggctatatttagtatttcataaattttataaactcatgttactttagttggctcaaatgttaaaatcaattaatctttctctttagaaggcagatatttaagcctacctagaaaccaaacatattttattttgtttttatttcaaaatctcaaaatggtgaggtaatcaaggcagcaaaattaagaggatcaacattatgagacgttgaagtataccaaaagaagcttaatatgtaaacgaggacaaacaggtttctgctccattaatcacagttataaatttgcataaagagaactgggagaacaatttataaggttctaatgtaaatataagaaatcttaatgaaatggtatcaaccaaagccgagaaaaagtgtgtacctcctaaatgctggttatgctacataggtctcttagattttcacaaatgacttgaattttggaataactagacaaatgttctccaaactaataaaagatggccaaaaggtagattaatatagtaaaaaattataatatacttttttggcatcggaatgttctaaaataattgtttaaatataggtgttagcaatatccaaaaatatattctaaacctgatgacgaaggtataagataatcaatggcaatgatttgtctcctccttctatccctgagcaatttcttattctttttccttccagtctgggaataaaccactttctttgtttagccataagaaacaactcatccattaaagttttatcatgagattgcagcaattcagttacatcttcagactccatttctaatgctaattcttttgttatttctattacattcgcagtgacttgctccactgaagttttgaacctctcaaactcactcatgatgtttggaatcaacttctttcaaactccttttattgctaatatgttgatttcctcccatgaatgtttttaatggcttctaggatggcaaatccttaccaggaggttttcaatgtagtttactcagatccatcaaagaaatcactatccatggcagctatagcctagcaaaatatatttctttttttttttttttttttttttgagactgagtctcactctgtcgcccaggctggagtgcagtggtgtgatcttggctcactgctgcaacctccacctcccaggatcaagcaattctcctgcctcagcctcccaaatagctgggattacaggtgcccgtcaccatgcccggctaatttttgtatttttagtagagacagggtttcaccatgttggccaggctgatctcttctgacctcaggtgatccacccgcctgggcctcccaaagtgctgggattacagacgtgagctaccatgcctggcccatatttctttttcttttttcttttttcaaggcagagtctcactctgtcacccaggctggagtgcagtggcacaatcttggctcactgcatcctccgcctcctggattcaagcaattctcctgcctcagcctcctgagtagctgggattacagacacatgccaccacgcttagctaatgtttgtatttttattagagatggggttttatcgtgtttgccatgctggtctcgaactcctgacctcaggtgatccgcccatcttggcctcccaaagtgctgggattacaggcgtgagccaccgcgcccagcctattttttaaataatataacttgaaagtcaaaattactcctttgtccatgggcaatagaattcatgttgtattagcaggcatgaaaaaacattaatcttgttcatctccatgagggctcttgcctaaccaggtgcattgtcaatgagcagtaatattttgaaaggaatatttattattttttctgggcagtaactctcaatgggcttaaagtattcagtaaacctgttaaagttgtaaacagatgtgctgtcctccaagctttgttgttccatttctagagcacaggcagtgtagagttaacagaactcttaaggatcctaggatttttgcaaaagtaaatgagcactggcttcatcttcaagtaacctgctgcattagcccctaataaggggctgtcctttgaaggtttgaagccaagcgttcacttttcctctttagctgtgagtgtcctagatggcatcctcttccaatagaaagatgtttcatctagattgaaaatctgttgtttagtgtagccaccttcatcaattaccttagctggaacttctaggtaacttgctgtagcttctatatcagcatttgctgtttcactttgcactctcacattacgaagaaggcttctttcctaaatctcatgaaccaacctctggtagcttcaaatttttcttctgcagacttctcacctttctgagccttcatataactgaagagagttagggccttgctctggattaggctatggcttaagggaatgttgtggttggttctatgcagaccactaaaactttctccatatcagcaataaagctgtttcacttttctatctttcatctgttcactggagtagcactttcaattgcctttgagaatcttttctttgcattcacaactttgctagctgtttggcgcaagagggttagcttccagcctatcttggctttcgacatgtcttcctcactaagcttaatgatgtctagcttttgatttaaattgagcgatgtgtgactttctttcactcgaatacttagaggccatcttatggttatgaacagggctaatttcaatattattttgtctcaaggaataagaaggcctgaggagaaggcaaaagatgagggatcagctggtcagtagagcagtcagaactcacataattatcaattaagtttgtcatcttctatgggcacagttaatggcactccaaaacaatgacaatagtaacgtcaaagatcactgatcacagatcaccataacagatgtaataataatgaaaaattttaaattttgaaagaattaccagagtgtgacagagagacacaaagtgagagcatgccattgaaaaaacaaacaacaacaaaaaaacccgatgccaatagatttactcgaagcagggttgccacaagccttcaatttataataaagcatatgatctgtgaagcacaatgaaatgagaatgcctgtgtatatctgaagtcacccaatggaggatgtatcagtgcctatgtctctgtgtgggaacataacatgatgtgtctgtgtgtgtggtttaaatatataaataacacacacacactcacaaacacacactcgtggtttcaaaaagaaactactcaagcacaattcttctactcaaaatgtccctgaagtgagacatttagctctgatgaacttctatactatgtggggcagacttcttgaaaataacaatacacagagcttatttgaaaagcaaacaaatcagattacttatatgctataggtgtttgctattaaatttgaaaataacatatgtggggagaataatcaggctgtaggtaactaaaagttgactgtcatcactaaattaactacaagtgaatccaagattaaaagtgacagaggcagaaaaaaataaaaatgaagtgtaatgtcatacagctgaaaccagagtaatttaccaagagcagatacaaattcaatgggaggggttggcttcggtgaaatatgggagataaagatctaaggtaacatagactaaatgtaaattttaaaaaatgatctgaggtgagaatgttgtggaaatatgtaaccaatatttttaagaactgtttttttccatcaattcaacattgctgttatcctgtttctagtttcaccttaatatagaaacaaagcaattccagtaagatatataaaatatgtgcaggcatgattcagaggaatagaaaaaagaatgaataatttgaggaggaaaaatataattggggttatatatgtaggataaaggtatataaaacaagcccttaaaaataatgttaactgccttgaaaatgttatttttaatgagaaagtagattaatgaagacattggccttcacttgtattagaaaggatttagcagagattttatctgaagcaacttcttagcatagtgtaaatgaaatatttgcctgagtatcgggtttagaagtttcactgaaaggaaaagaaacttgacttgctgcctcaaattctagtagctgaaattatatgaggtgaagtttccaacgctgtctcttaagatagccgacctggccgggcgcggtggctcacgcctgtaatcccagcactttgggaggccgaggcgggcggatcacgaggtcaggagatcgagaccatcccggcaaaaatggtgaaaccccgtctctactaaaaaatacaaaaaattagccgggcgtagtggcgggcgcctgtggtcccagctacttgggaggctgaggcaggagaatggcgtgaacccgggaggcggagcttgcagtgagccgagatcccgccactgcactccagcctgggagacagagcgagactccgtcccaaaaaaaaaaaaaaaaaaagatagccgaccttaccttaatgaattttccacaaacctaagtcagattctttgggcaaaacttgacttatccacagactctagttcaatcacaagcataatcacagtctgtgagactgaaatccataatcaaaatgccattaaattaacttaaaacaagaagactaactgctaaagggagaggagggtctggccaccacactgtgtgggtaaggtatatggagagccaaattgtaaactaggatgccagtgtattaatttgtaatgaaaaagtgtattgctgaaaggactggacacttctgttctctaccccgccaaatctccccctgcagggctaccagatgggaagccaaattaaaatcagatgcttgcttcttgggcttggaattggaacaagaggagtaaatgataggattgcaagttcagggtaacaggtcatctttggactgtggagccctttctcctaggctgccgatggctatgcacaaacttgatcttgtttactgtgctttcccctccagcttcccactgaccctttgttttttctatagttctgttaatgtactcaatcaggctacagtggggtcttgctggcctgggagctatttagttctctttgtggtaattttgttcccatctttccactgagtgttgatattttagtttaactcacaaggcacaatcttatttttggaactcttcagggaggcccccctcaacccagcactgacgatgtaagacaacagagatgattgcttaaatgttttccaatcctacatctctgtggcaaaaagttttttaacactatattatggcacacagataactgaatttcctttccaaagagtagaaaagacaaaggaaaggaaaatctgggtggactcagaagatgtggcctctataaaactaaatcctcaatcttttctcatttctaagaaggggaaaaatgatgatgattgagatgttggaattcattgtcaggaaacttgaatttttgctccccatggagatcaaatggaatatgcagatggagtactttatttcttggtagcttttatagatattttgatcattttcttcatattagagatttcaatttgaaattgactgtgaagatatagaaacacatgctcagcagaaacgtcttacgacatattaaaccattttctccctggaaactgttgtgataataaatactaccaacatagaggaaaccactggggtggataaaccttattatctatctgtgcattattgttaaaaatactaaaatcaagccatgtgtgttgcatggagttctactggaaagctatcatgtaataatacaaaggaagataagagagaagaaatacaaatgggagtgactagagagtaatacaattaatttatagccacatatattaaatttgtttaatattgacagtagatttacccctgggaaggagaagaagaaaacagaatagattttattttaaagaactcctgaaaccttaccggatgttgcctaatgaggtgatgtaacataaaacatcactcgatgctgtatttgcatactgcctttttcccctaagagattgttttgaaagaataacaaagaaacagaaatgaggtggaaaacaaaataacaaagcataaatattttctcagtgtttgcaaatattcataataatttcctatcctctgattcattagttctctcaaaagcccacctggatgtcctcagaatgcaaactgatacttaattattacattgggatctagattctttatagctatgccactcgtgtgaaaaatatgcatatctatttaagagctgtgcaaagcagtggtgatgtgagttatgccattttgctcaacacaagacaaactcctaaaaacagctttaatgtagacacaaactgttttgataaataaagctaactcttaacaagattgttcagagaagactgactttttcaatgtattcctttgtacccttttcctttcaatgtagaaccttctcttcctgctgcttcctacaaccttttcctcctacagttttctgagcaactccacttatccatagagaaaaagattttggcactctgattttcagattactcttagcccaaggtctacatatctttcccttcttcctcacccttcccaatttcacaggagacccagtgctcccttgtctcgctttaaattcttccctataataggccagaaagactctgacaccagatgcattggatttgttttctaactaaattttagtataaaaacatttaagtctagtgacatcacctcgtgcgtatggttttgcatttagtacccttcatattccattttgaaattggccattcactcattcattctctgaactggtgcatattgatcatctgctctctttaaggcactaagctaacttctatgagaggttaaaaaataagacctggtcccttaaggccagttaaagacaaggcctattaaagatttaatcttctactaaagacatttcaaacagcctttgcttaaagagaagtaagatggtaggagactggttagcctctgaaatcacattatgcctaatattggccctaaaaatatattttgttgaggtctttgttaagggagatatggggatatggggcagatgaaatcacagcatactcttcctctgtcagaattctcatgcccccctattgcacacccaccaacccaacaaacacacacattaagatataattacttatacccagacttctgtttgcaaggggctgctgtcctgcctatggctattgaaaacctatttctccatgatgtacctatctttcctgggccctttacctataatatgcacttccctcctcttccagtcatgtagtagatataatcctccagttaacccagcccctaacttcagtgttttattttgtctcaaaaatccaaatatttccatcgaatatttggtgtactttttagagaatgccgtgtcatttttttttgtaattcttcttttctaaaattcttgaattttaattttaagcggtgcatttttatttctgaaaatcaaatttggctaatgaagtgtttagcccaatccagtgaagctcagctccctctttgagccacagtctgtgctgtctaacgaaccttcactgaactcatgggtagtacaatttagtagtggtatttcagtagtacctgttgtatgcctcgacaaggctttggagaaaattcctctgttctgatttccaaattcagctcttttctctgctaattgcttcttcttcttcttttttttttttttttagacggagtcttgctctgtcacccaggctggagtgcagtggcatgacctcggctcactacgacccctgcctgctgggttcaagtgagtctcctgccacagcctcctaagtagctgggattacaggtgtgtgccactacgcctggctaatttttgtatttttagtagagacggggtttcaccatgttggtcaggctgttcttgaactcctgacctcgtgatctgcccacctcggcctcccaaagtgctgggattataggcgtgagccacggcgcctggcccattgcttcttgatataagtactagctattctacagcctgcaccatgacgtagccctacctagtagaaactttgagttagattgcagtcatcaaagccatttgcccttcctttgtctctaataaaattaccaaggacctctccttaagtagtctatcatcctaaactctcaggagatacctctgagtcttggttttctttaaggtttgcaagaaaggccaatcactcctttcttagaacatttaataccactttttaacttatttcctataataccaagatggcacacatattaatcaaaaacacaaaccctcccgatctgacataatgtagatgcaacattacacactttgcccagtaagtaccctctccacctcaaggatcctttgccctttacaaaccatgtttcaggttctccatctctatcacagcctgaagggcaatgtcccaatgtattcaggaatcatttagactatgatgggatggcacagtccctacatctgctaccaaatcaaggagctgattaacagtgcattgcagctcttggcaagagttagagtaggaaataaaattaaggtgtaggggttaggcaggaaattcagataaaactacttgggaaatgtagctaagcaagatataattatctaacttataattagactagaacatcaggcctcccatccctaaaggcttctttttgcaaagagacaagtgataccatcaggtagcagatggtattcttgtatgggtgcgagtgagtgatgaacacttcttaccttaagaatttggttgtaggaattattcctactggtgataacttgctagcttaatagttcattatttctgtgtcttccattcctttgggctagtacacttattaaattagaaaggtggggtggtctgcaaaatttcagtgacatctctacaggctagctattggcctctgccatttgatcatctcaaactatctagcaaattaatacaaccaacgaaagccgacagactacattgatttgaatataactccaatttttttattgtatttcttaaaagttctatgacatactttagtttgcagaaaacagaaagttacttagttttagagcgtgattttttttgtctcactggatgtttctggtttgtttgtttgtttgtttgtttgtttttgagaccgagtctcgctctgtcgcccaggctggagtgcagtggcgcgttctcggctcactgcaacctccacttcccgggttcaagtgattctcctgcctcagcctcctgagcagctgggattacaggtgcccacaaccacgcccggctaatttttgtaattttcgtagggacgggtttcaccattttggccaggctggtctccaacccttgacctcgtgatccacccgccttggcctcccaacgtgctgggattacaggcgtaagccaccgtgcccagctgaatgtttctgttttaaagatccttgcatgtggctctgtatgtaaccctgtccttgcaaagttgttagaaaaagataaatgaactcccattggtttaaggaattgactgtgaagagcgtgatgtaatctaaaaatcagaacaccaaaacttgtttcctctttggataagtagaattggtcaaagaacagagtttatgacttctcttcacataaaagatgacattatctatgatgaaagacctagttcttgattttcttcagattccacatggacatcttacttgctaaaagcaacgtggccaaacaatttctgcctgtagcaaattgttttcagttatgtttcctcacgaagtagtatcctgaaattaccagtttgcatactgtttgcaattattactacaaatgcagtttagcttttgtgtaaatgaatgaatttttattgtatatatttaaggtatagaacatgatgttttcatatatacatacatagtgaaataattactgtagtccagcaaattaatatatccaccacctaatatttagcttttaaagccctttaatttctaaatgtggaattggttcatttatttacttatttatccattctataactcattaattctttgtaccaacatttgctgaatatgtactttgtgtaagtcactttgttaagctctctggaaaataaaaacaaagttcaattttctgtgtagtaaaacgtgtttaaccacaagacattaacagagtactaaattaatagaaatttttcatgtcaactagtgcattattttgttatggcttccatcactaagtaccatagactagatggcttaaacagcagatactggttttctctcagttctcccagtgtgactatcaggattctaatcctgtttttgtatttgtattaaaaagtgatagaacgtatagtcaagacggatggattaaattgttcatctcgcccctaagaattaagagtttttgttggtggtggtttgtttgtttcatctctggctgacaggaagagtgaagaagagaacgctgtttcctcgtagccccaaataacatttcacctacttctaaagctgctgtgaggtatgcaaggtcttacataaagagaaaaatctgtctcaaaaatctgcctcaagattgtggagtcttgctctccttgcattcttttggtttttctgccacaattttgagacttatcctaggaattcagttcagcctttttttcgccttcaaaataagcacatttggctgcttattttgcagcagccaaaacgaagcattcggagatgttattgttgttgttcttctctatcggtccagtacagttccttttcttcttttattcctaggaaatctctttgaatctactctgtaaatagaaatggcttcccaccacacagtgaaaaccaaaatccttatcttgactttacagggtctttcatggtctggccctgcctgtatccggcctcctctctcactcttcctcttgctacgtggctagaagcaagaaaacagggaatctaatctagttttatctggctctaaacccactgctcttaatcaatacactgcaatgcccttgtaagttatttacctctctcccatacagtacgtgccaggtggcccatagttctagctcctatctccaacctgaaaccaattattttcacaaagtcacattgattaaagtataatatttacagaggtatgtgtaagagttgtagatgcaaagtttgattgcttttcacaaagtagatgccactgcataaccaaaatccagaccaaatttttacctgtgccccaatgaaccccttataaccctttctgaaacctaccccaccaagtaaccactattctgacttctgaaactataggtgtattttcctgtttatgaagtttaactcttaatttaagagtattagatatactgttttgtgtctagcctgttttgcttaatattaaatttgacagattcacctatgcagaagatagtatagttcattctcattactgtgtatgtgagtatattacaaattgtctcctattttaccgtagatggatatttgggttgcttctagtttggaagaaattcaaatactgccactagaaacattcttgaatatgtcttgtggtgaatatatattcttttccttcctcttatttttaaacttctattttaagtttagggatacaagggcagaggtttgctacataggtaacttgtgccatgggtttgttgtacagattatttcatcaccgaggtatttcatcaccttagtacccattagttatttttcctgatcctctccctcctcccatcctccaccctctgagaggccccagtgtgtgtttccctctgtctgtccatgtgttcacatcatttagctcccacttataagtgagaacatgcagtatttggttttctgttcctgtgttagtttgctaagaataatggcctccagctccattcatgttcctacagaggacatgacctcattcttttgtacggctgcatagtattccatggtgtatatgtaccacattttccttagtcagtctattattgatgggcatttaggttgattccatgtctttgtgtattctaacagtttacatcactatcagcagaggatgagaatattagagttctcattactctgtatgcttctcagcacttaatagtgtatctatatcatttgagccattctcatgagtatgtcataacactacctctttttatagaccttatttttccttaaagtaactaatttattttagctgtaggacgaaagcagaaaactcagacaaaagagaaatattacctttagcaaaacaatcagaaatgagatatcaaaaatcacccgaaatatactacctaaagaagactaataacatttccagcgttagtcggttagacctttcctttgtttgtgctttcaagtacagtcatgtgctgcataacaacatttcggtcaactacaaggcacacgtgtgacggtggtctcaggagactacaatggaactgaaaaattcttaacacctagtgatgtcccagctgtcgtagctgtagcccaccacattactcatgtgtgtgtggtgatgctggtgtaaacaaacccactgtgcttccagtcatataaaagcatatcacatacaattacaagcagtatataatgcttgataatgaaaatcaactatgttactggtttatgtatttactatgctatactttaattgttattttaaggtgtattccttgtacttctttttaggtttgctgtaaaaccgtattcagtgttatgccagcagcagcctcatacatcccatgtttactgtgtctcttgactgtatcatgttcttttgtgcttaatttaattacacattattttattcatcacggtccttaatcatcaaaattcatggctaatgtgtcagaaagaggccctgtcctgtgattgacctgaaagctaaattaaaagtgaataagaggtacaaagatggaaaatcagtaatggttattgctcaccagtcaggtctgtcccattccaccatagccatgatctcaaagaatgagaacaaaatgatggaagctgaaaagatcttcttcattgaaggcaatgagactaacaacagttcaggaagagcctatatcagatatggagaaacttctaatgacctggaatgaagaccagtcacagaagtgaattcctcccagcaccatgatgatcacagccaagcaagaagtttgttcgcaatgttgaaagaaaaggctggacccaactacaatgttgaatttactgctagctctgggtggtttaaatgattcaagaactgtttttcattacgttatgtgaaagtaagtggtgagtctgcaagtgctgatgtgaagacagctgaagaatttctgaaaactctagttttcagttgattagtgataagttgattgtgagggggaattacttgtcagagcaaatcttcagtatgaaggaaacctctgtattctggaaaccaatgccttaaagcactattatccctaagggggccaagtcaatgctggatgtcaggtttttaaggacagaataaccatctcactttggagaaatgttgcaggctacaaatagaaacttttaatgatatggcacagtgacgaccccagggtctccaagcatatcactaaacacgcactgctggtaaactagaggagccataagaagtcatggatgacccagctcctttccaagacgcccttctgaattactatgccagcaaaatgagaagtactattggagaataacatacctttcaggatttgcttattgttggtgatggtcccacacatgctccttttattggtgatctccatcccaatatcaaagtaatgtttttccctccaaacaccacctctttgattcaaccattgcatcaaggcattaaagcactttttaaggcctattacctgagaaggacttttacccaggctgctgctgcaaaaaaaaaaaataataaaaaaaataaaataaaaaaataaaagataccaatgcaattctggaaggattacgacatctctgactgcaccaagaatcttgcttgggcttggggtggtgtcactaaggagtgtataaatggcagctggaagaagatactcaagaggttcatcaatgacttcaaatgatttgctcaggatgagcaggttggaaaaatcaacaaggtggtggttgaactggcagacaacttgaacgtgggtgtggatgaggatgacatcgaggagctcctggaggttcttgagaaattgactaatgaggagttgttggaatagaacatatagctgaagaagaggcaacagaaaaggaaactgcaggagaagaaaaggaaaacccccaaggaaattcacagtgaaaggtttagaagtttttacagacctcaacaaactccttaaaaagtttaaaaacgtggaccccaaaactgaatggttcgttcatagaggaatgttcatagtgcattgtctactgataagaaaatctatgattaaagaaagaaagaaacccagcaaaacttcataaacatatttctgaaaagagtgacacatctttaaaaagagccttaagcaggtccttcaggagccattccagaagcaggcattgttatcacagtagacagcagctccatgggtgtcagtgcccctgagaacgtcccagtgggacaaggtgtagaggtggaagacagcagtagtgaccctaaccctttataggcctaggctactgtgtgtgtttgggtcttagtttttaacaaaaaagtttaaaaagtaaaaataaaaaattaaagattgaaaaaatatttaaaaatcttaaggtaaggatataaagaaagaaaatatttttgtacggctgtttgtgtttcaagctaagtgtgataaaagagtaaaaaataattaaaatttataaagtaaaaatttataataagctaaggttaattatcaaagagaaaagttttctatatatttagtgtggcctaagtgtccagtgcttctggcatctacagtagtgtgcggtgatgccctaggtgttcacatcctgtcaccactcactgactcactcagagcaacttccagtcctgcaagctccatttttgttaagtgccctatataggtgtgctttttttttatcttttatattaatttttactgtattttttctatgtttagatatacaaacacttaccattgtgttacagttgcctaaggtatccagtacagcaacacactgtacaggtttataacctaggagcaataggctataccatatagcctagctgtgtagcaggatataccatctgggtttaagtacattctatgatgtccatacaaagatgaaattacctaatgatgcatttctcagaacatacccccactgttaagggacacaaaataagattttacacaaaatcttgttacttcatataacaaaatgcaacataaaactttcaaaacaaataaatacacttatgccccataaatgttaatgtgaaaatcatatttcatcaaaaatctatattactatgttaaaatgaacagccttgtaacatatctttgcataggtccctaattaattttcttaaaataagtcccaaagtggaattcttgtgtcaaaaactatgtattttgttacagctttcgaagactactgttagacaatattgtaccctgaccaactatatgctaccaccatcctacatttttacccaagctggatgtgggaattcttatttaggtcattgtgacactagtttattggtagtcgttactggtagtgaaacaatgactccaattcacttcccagccagccatcctggaggggctctgggtgcccgggcaagccccagcctctcatctgcatgctcaattccactcttcttttgtttcccattggcaccaccattgtccgcctcctggactcatctcttggtcttctccatccttccagctattccagctatcatatcatgaccatatcaggcttggactcccccctaatatttattcgctaccataaactaaattatgttttccatcctaagcacaaacatttcactaacacccgtcatctgtttgtgaggcagcagcaggagcaggtaatccacggttctgctttctctgtactcttctagaaataggggagcttagattctccctggatcccatcttctagagatggcattactggtctcatattctattttctttcatgtattgaaacttttgttattaatagcttctgactaaagtgaaaatgtcaatgtgtaaaatatgtggggtaatgtgttccacaatatacagagaaaagctctgaaacagtctcctgtaattctggattttctgttttcttcttgttttttaaatttccgggttcttgagtccatgtggtctaagtcctgcattaatcctgaacacatggcagcagggataaagggaagacctgaggtccgtgttccaattcgccagggatgtgaatgccctggacgttctccttctgatagggacaggaggcagagaaattctaggcagaaaagggtggatccccaacaaaaccccaccctcaagcctgggaacacagtccaaagtgagaacttacatctctgtttctggctcaaatatttccttttccaaaaccatgtgtggccctgccccatcctgtgcctataaaaacctcatactcaaccagcagagagaggtgaagcagctggacatcagagactgtggctggatgttggagagaagtggcttgacttcagagggagagcttgacagcataactttggagaagaatctggccagagatggccagacgtcaggggaagattaccttcccattccatttgcttttcagctccccttccaactgaaagccacttccattggcggtaaaatccccgacagttgccatccttcaggttgttcatatgacctcatttctcctgaattccaggcaagagcctggataccactagtgtggataaaaaaggctgtcacacttgccctgtgcccctgctggagggcagccacctcatgtgagtaggcagagggacgactcagctgttaacactcaagccgtccacggatggcagagctaaaagagcactgtaacactccctctggagcttcaggggtcatgggcatcacgccagactctgccacggggcctgcatgaagtttgctcctgctggtgcccaaaagcactggctctcggctcctgcctccacttacccgtgtgctccttcccatgagtggtggagcacagcggatccgagtgagtggagctggctcctgcctgcgctgaagcagccagttggttccagtgtttgcgcactccagttctcacctcgttcatttcatgctctttcctgcaaggagttgacggctgtgagctgggcaaatgaggcacccggttgcaagttccatgaaaggctcggggaaatatcctgcttcacttccatatggagctagtgctttgtaaagtgcactgacaataacaaagtgtagaggaggaccggacacaggctgaactgagcttcttgaaaaggctgcagctctcagaacaacgctgagaaaactggtccttcagctatagacacagagtcaagaactccatttttcaaattatatctcatgaaaagctggtgtccagtgacgtttatctgagaaaaagaaatttttttttggccaaaataactagatagatttttgttagactttataatgagaattatgaatttcctgaaagtgggatggaatacagaatgttccccaaattgtttccatggaacagctaatagcacatagagcatgcgtatttgctgtgacatgataaagctcaaggccagagatgtcttgtggggctcccaagtactctaacctcaaggtgcatgccctccactcactaattggctcctctggctgtgatcgagctccaaaagggaaggaggctaattcaaatgggatggccccaaaataagaggaatagtgtgcatttaaaccaggatatgggctatacctgcttacagtaccctttatgcaatctccagttcattaactctagtagatattgtgaagatactatcaaaaaaaggttatgttcccccaaattagggaagccctaagggattccgtatctcctttttgtacagagtttgttagaaaatcagatactggtctgagaaaaatgctgattcagatggtcaagagactaaaaaaaagtactttaaaacatcagaatgaaatcactgaaggcaatccttagctttatgatgtgctgtactcctggacaagatggtgtaagttgagatgatatgtcaaatctgatttttctataggaaaaaattgtactttagggaggtatagttctagccatgttcttaatacccaaaagttaatcagaattaccacaaatgatctactcattcaaatataagtagcccacaaataccatgttaaactttctaaatttgaattgtttaaaaaagcaaagttatagaaaatgacatttatgacccattatcagaagctttagatccaatattagaatattagaggcttttgtgctaaactcttttctttcttataaattctagcctttatttatctattttaggagggcatgtggcaaagcatggcagggaattctttcaaaagtggaatccaggaagaaaattccttgggaaactttggactggattctcaacaaacccttcagagagacttaaagccggtaaaagaccttttgcaaaagtgatccggggggcctccactttgtttctctggatatttctctgttgaaatataggtgtcaagcacgtcccattttagatgctcttcagacttcaaaacattaccttcctgctttcagggagccatttcatcagcttttgtactgtgtattcactgcagaccctgctgttatgcaaggtaccaccatggctaaaaattcacaagacgattcttagttgcactgattttttttttatttgatctttcacaatgttgctgcttccgtttcaaaaacgtctcaaagctttgatttgattgcagctggattcaaggatacccaaagccaagtttgatcctgaattccccaaatcaaaagtatttcatttcagatgtatgttctatacctggccataataatgaacagcaaccattactggagcatgcttttgatttttttttcattaacagtcatttttatgatttggaaacataattagaagattcctattccagactacaaatcaatggatttgattctactacacatttgccaataaagagcaatggtatcaaatgaagcatttgacctgtctttaaatttctttcattctgtaaattctacatgaggtatgatatatggagccaactggctcctctgccacactgctgcagttcagttgttggtattgtctggaaggaaaaaacgaagttgtggaagtgtgtgagttagttggaggtaattaccatgtaactgattatcattcatgttctgagcgctgtgctattacatacattattttatttcatccttgcaacatccttattcctatttttcagctaagtaaaaaatgaggctcagaatagtgaagtaattatccacggagagggaagatcagcagtatagattaagttggaataaatctaaagctcatcctctttcactatagcatgctgctttctagctatataagaaaaaaacctcattattctattaccccattgagaaagtactgttctctcttgttcagctgtctgctttacttagctccgatgaaatctaaattaaatgctctgctgctgatgatgttggtaacactctggtggtactaaccatagttctggggagtgaatgggaagaatggccaagactggagatggggacattagattttgagacacagaccaactgaaatgagactgtgttttctgttaataataggaatttaaatgaatcattgaaaaatcagagaaagttttctgaaatataggaagcaaatgctacctatacttctttatatctttcaaattaaaaaataattttcaatacatgttaaatggtacaaaaatcagtggggcttttttaaaaattcaagctttataagaaaaaataataaaacatgtgccaaatatgtctgaatactattaaatgtaaatggtgtatcattaaatgcactggctgtttgggagaggtgtaataaacaagagacacattgtagctatgaccgtgacgatttactttttttaattctggaggaaatttcaaactgtggaatatataagcagaaaggaaatgaataatgcatctaactagcatgcgatagtaagcctcactcccgttgtggacagacaatatacaagaaaagattttggtggaaagatgtaggtgctatttaaggggaggatattctttattgaaaacatatccagcaacatctgaatgccaaataaaagtctttacagtttcatctctccttagagagcatattttttagttgttgttttgtttgggagaaaattgcagtttaagatttacaaaccacttcatttgcaaactgctattactatagtttctgcctctgaaaatgtttaaagctgcaggcaatgaaaagacatattattagagcttttccttataaagaaagctctcattctattgtaaaaaatgagcgtataaaaatacaatattatttatagagttatttatataagcagcattttgatgtgccttcctgaggcttggagatattagaaagcagaatatctgagaaaacatatttcacttcgttgtttaaatgcaatagagatcaagagattatcttcatcatgataagattcaaagaaatttacactggtaattggagcttgtccatagaatttattccttattacaatatagactataggttgttacatttttttccttaagggaggtaaggttagatttttcactatttaggttgagactctttagttgataactgaaagttttcttttagcattcaatttgttcttgaattattttttatttcagcatatctttctaaaaattatgcatgatcagctcttttttttttccattttcctatcagctgtttatcttagatcttcattcatggatgtgttagtttcccaggattgccaaaacaaatcaccacaaactttgtgtcttaaaacaacagacatttattctctcagcagttctagaagccagaagtttgatatcaaggtattcataaggccaaacctccttcaaaggctccagggaaaaatccttccctgcctcttccatattctggtggctccaggcttttattggcttttggtggtatcactccaatctctgcctccgtcttcacaaggccttccattcagtgtctcaaatcaaatctcttttctcttataagaacaccagtcacttgacttagggcccacccaaatccaggatgattaattttgagatccttaacttaaacatatctgcaaaaatccaacttttcaatttccgaataagatcacatttccaggtgctaaggtatattagtcagggttccccagagaaacagaaccaaggggatatctaaatgacccttatgggagaccactagtgtcgatcctggttcaactctaaaggcctgaaaatcatgagtgctgatatctgagggcaggtactcagaaagaagaaatttattctttctccaccttgttttaaattcaatccctccatggattggatgattcgcacattggtgaggtggtcttctttactcactgtactgattcaaatgccaatctcttctagaaacacttcacagacacacccagaaatgatgttttactagctatctaggcatcctttagcaccatcaagttgacacataaaattaaccatcacacaggggttagcgtttgggcatgtattttagagggattcaggtgaatgtattacaagatgtgaaaaatagactttggagttaggcaaaactgagtgaaaaacatggatctgccactcacattgaggaattatgatcatgcccataattctttagagcacaagtttcccccttttaaaaataacgatattttaataattgtgatgatactagcttcacacatgttgtattagataatagcgtgcattgtaagataatatgtataaagcaattagctccctgctttgccaataaatggccattgttaatttattgattatatggattttatttttctaattagagtaattccattgacttcaatttctatagagttcttctttccttttatgcagcagaagttacaaaagagaatgtgacatgaatcatatctgtattgaaaatagacatacgatgactaattttgttctaaatgaagaatgttttcttatggaattattgtaagaattaaatggaaaaaaatgtatgtgaagtacttagcagttagcatttagtgttagctactattatcaacaattccctaaaacctgctagggttacagtaaccatggcaacacaaactctattttatttagtaatatatttatttgctaattgacaaacaaaattgtatttgttcactatatataatatattgttttgaagtctatatacattatggaatgactaggtctaggtaactaacatatgcactgcctcgtatagttatcatttttgtggatattttgcattcattctcttagcattgtttaagaatacaatatatggctaactatagtctctgtgttgtatgatagacgtctttaacttcctcctatctaattgaaatttcgtattctttgaccaatatcttcccaaccaccatccaccaactaccccagcccctggtaactaccattctattctctacttatatgagatcaactttttaagattccatttatgagggcaatcatgcaatatttgtctttgttcctttggttggtttgtttcacttaacataaggtcctccaggttcatccatgttgtcacaaataacaagatttcctcctttttcatggctgaatatagtattccactgtgtatacatacagcattttctttatccattcacccatcaatggatacttagattgattccatctcagctgttgtgaataatgctgcagcgaacgtgagaatgtagatatctctttgacatacagatttcatttcctttggatatatactcagtagtgagattgctggatcacttaggagttctgtttcattaatttttttttttttgaggaacctccatactgttttaaatactggctagtttacattatcaccaacatcaggcaagttctcctttctttacatcctcaccaacacttgttctcttttgtctttttgacgttctgagaagtatgaggtcatgtcacattgtagttttaatttgtctttccctaatgattagtgatgttgagcattttttcatatagctattgaccattttgtatatcttgtttagagaaatttagagtcatggctcatttttaaattgagctatttgttattctttgtttgttctgccattgagttgtttgagttccttgtttattttggatataaaccccttatcagatgtgtagtttgcaaatattttctttcccccattctgtaggttttctctttactctgttgattgtttcctttgctgtagaacagctttctattttgatgcagtcctatttgtctatctttgcttttgtcgcctgtgcttttgaagttatatccaaaaatcgttgctcagaaaaatgtcatgtagcttttttttctatggtttttcaacgagtttcacagtttggggtcttatatttcagtttttaatccattttaagcagatttttatatatggtgtgagataaggatctaattttattattctatatgtgggtatccagttttcccagcaccatatattaaagagactctcctttctccatggtgtgttcatagtacctttgttgaatattattagttataagtgcataaatttatttctggagttcctatcttgtctcattgttctacacgtctgtttttatgccagtgttgtgatgttttggttactatagctatgtagtatattttgaaatcagggagtgtgatgcttccagttttgttctttttgctcaatatcacacactcctttctaaacctcatcatcgtttagggtatataatacaattaataaatgcatatataattatatgtcttttcaaataattgataacctaaacttgataaccaatcatagttttacatactaactggcagttcctttctatcttgccctgaatcttattttatagacatacatttccaggatgttacatgagccttcagtttagctcatcaatactcagctatccaaaattcctcattgccttgcagcagtttttcccaataccagggccatgttcttagctggctttgaaaaatgttttgaagaggcatcttctccagaaatcttttgagactgatctccccaaatatgaatggtgctaggattattttactaataattgaaccttctaatgcttttctctttgttattgatttcttttgtggcattaatttttaaagtgcttgatttcccagttgattatttgctatattaatcatatgtctttcaaggtcttggctttgttaatactgtcttaactgactacagaatgaagacttctaactttcaggtaaggattccgcgttttttattcaggacaggtccaaaaaatggcaagataacagcaaggggattcatttgcctgcaggcagtttggttaaaattctcccttagttctcatatacacattataatttgcattttaattttactgtcttcacaaccacgaaagcatatttaggtaaaagtgctaattagatctttgtaaacaaccatatgttattttggtttatgaaatttaaagagcaattaaaaacacatatatttactacttataggtgggagtgggaatgactttaatctgaaaagtgtaagtgaatctgaggaaaaagctaaattagagatgtgttgaatgatcttttggaagaaactaaaagaaatttgaaacttttcttcagaaaaccatagggccacacaatgctacacattgagcctcaccataattaaatcaaaatacttgaaaattatatttcaaacctcttttcaactactgtacttaccttagagaaatcttcaaaagaaatctgtggtatgtttattgttaatgaaagcatgtcattctttctctggtgacttatccgtctttatcagtttcactgtgaagagcagagtgatatatgagtgtgataacttaagatgacatcttatagtgcaatccattatctgaaagatttaaggaaaaagctctctgaaaaaacataattaagaaaataaatgtttttagaaatataataaagatcttttatggttttggttcaggaacatccatttctataatatgatacactaaggaaatagtctgccaatcatctaaataacacttgtattttgatttttattggtttggcttctccacaaagaaactaacaaatcattaacaaggattaagaacaaaaaagtgtctaaagtttttttagaaatggattgaggaagtagattaaaaggagactcagagaaaagagactgttttctaaaaatatggccacgttgtaaatgtgtgtttattttctcaccaataaaaataggcaatatgttgtttattgcctggatagttggacttgacttggtttttggctcctgatttttggtctgagtctaatgaaccaataaaaatctcttgatgtgccacataagtaactcccacttgaccccattccaggagctaaagaatctcatggcttcaacaaattctcctgaaccttgctttggaattatattgtttatttgtaatagttattttctctttgccttagttgatttaagaagtctagtatcacgtcaggatcataatatatagatacagaactccttaaaaataaaccccaaatctaaaatcaggattgaaaaaaggacagaagtgaaatcaaccaaagtaaatgtttaaaatatgcattcttagctgtgcttattcaaattggtcaactctgaatatcttcgtttctttttttttttaattccactggttacagattccaaatttcatccattccttcttgccttaaactgtgatctgtaacctgtgccttcactcaaattaccatttcagctcttttacaaacatcaaatagcaaagggcaatatggatattttattagacttgcacagatcagaaacaaaaaatgtgcacacaggttcaggggactatgtgcagcatttctgtaaggaaatagtgggtgtgaggtatagagagaaaactttcccatcatcaagttcctggacactatggtactgcacttgtcccactataattcctttaaagtatagcgactacttttcacctttgtaataactacggtacttctaaagggccactacaatagcaatgagaatatcatctgtttttcttggaggtggtagttttcatcaagcatatcaagacatatgagaagatggtatttaaaatattcagccaacaatatgtcctgggcatggaccagaatgaacactggccgaagtgctaaagcaatatattggggccccggctgtttctgagatgtggggacttttgtgaggtctaccctagtgtacacccggagtagattcaggaaacctaagccgttgatgtttaccagttatacaaaagtatttcaatacctgaactgctgtggctataccagggcatgttcactaaatatcagccatggactttgcaaatttaagcaagcagacataaaaataagtcatacagtcattctgatgttcttgccattgcacatgctctctctctctctgtctccctctctatatataatttattatacaatacattataataaatagtatgtataataaatagcataaactaatacctacaaaatatataataacatattagtcatattagacatattcttatacccaattaaatttttattaatagaatagacataaggctggagtgcaattaatgcaaaattaatatatacgttatataactcatgtataaagacagaatatttaacattagaatattttgttattcttgtttggcattgctttcaaagtccatttctgttccacataaagaaattcatttcaggttttcatagtcgtaacccacatatttgaaaggggaagtttcatgtgtatgagatcatagaccaaagagcatatttgtaaccatcattggttgtttttgtctgtttcatttagtttttatagaaatagaacggatttggaagcttactgtaaacactgtgaaatggtgaagacttaagaagcttttcttaaatctctaaactgctgagagcgtcctagtatgacaaaatggtgccgtcctttagtacttaaataaatatcattcttcctgaaacactacagttaaactcagtgggtcacttttgtgctttggggtgtaagaccccaaatattaacctgaggaacctaaaagcacaccagaactttctgaaactttttcccccatgctagatggggtttggtctaggagaaaagttttgcttctcttcccagtgggtcttgttttagaactctctaaagcaatgagcttctctggtttatcttccatcttgtttattgtacctagtctctgacatgcagaaatgacttaataaaggttttctgaattcgtgaaattcacctcctgaaaattaccaccttatgatctgaaaaaactatctgctcaacagaaagttactcatatatctgcttctatagatacagtagtctcccttacccatggtttagctttctgtactttcagttaactgcagccaactgtggtctgaaactatcacagtattttgcaagagagagagagagagagactacattcatgtaaattttattacagaaaacatggcatatatgggacttagtgctatctgtggtttcagcatccactggggtcttggaatgtgtcacccatggataaagggggaattactctgctagatttggtaaaaaggcagactagtggagagatcttctgaaaaaaggagataggaaatgttactgaagagaaatagaaaatattgtattaatttattaaaagtaaaggttattagaaggtattaaatttttgatataatgtaggtgacagtgtgagtggggaaagacctgtaagtgcaacaaggggatgaaattccctatcttctagccatactccagtacataaacggcttaaaaataatgtatatcaaagcaatgtaataaaggattaccgtgatgaattttatgagattaagctgcagttaatttccttatgcatttaagattaataaactgctaattagaatatgcaaataagggtttctgaagcctaaaatatattccctagcatcttacccataaatcttattcagtaactattttgttatataattggggaataacagattgatgagccaatctaattatgtgaaatttacatgtgtatggtattttataataaaggacatgaactaatgttaaagtagtggaaagtagttgtaacattcattatagttattaattacaaaatttaacttagtttgaaagtactttgtgccatataagctatcagccacaccaagtactcttactacacatctggtgcataattgtcgggtgagactgagcccatcagcaattacagcaattattgggactcttacatttacagctcacacacatcacacccaagcacacgtttctggaatattgctgatcatccagggacctagataacaactaattgcctcattatgcaaagtggggaaagatattcgtatttcttacatcttctgttctacattatacacatagagatgcctgtttgacagcaagcaacagataaaagaatattagaattatttttgtgcccagttaaggttttttgggtttggcttcgactttttcataaagaaagcatcttcatgaggctggaggacataaagcaatttgaaagctattatgggtaaaaaacatctaaagggtttacacacacacaaacacgatgaaggaattaggaagggctctaatgatcctactatttactactttggcaagataccaaatggaataagaattaaaattctattgaaaattaattcaactgagtggacagaatgctatgaagtattcggggcattttctttcatataatatataacatttactaatatgttcaagtaacaaaagttacctttatacagttcacctgtactctgtgtatttgtccaacattcccatgaaggacaaatgtaattaatcccaatttaaacaggtaaaaaatgaaactttgatatatgcaaactgcaatttgtaatcaatagtgagaaaatggaaactgcagcctttgcaatccagttctgtgttctttatacctgtgtattgccagatctatgtgtgtaaataaaattcaacaaagaaatacctgataagataagttttgtgggcatttatagcacacttagtgaaaatatataatatcaccaagcccgccatattagaccacttttaccttatttttcttactttaatcaatatttcattaaatttgacttaactttatgtgtaaagatactggtatgaacaacaattaccttgtccatattattatctcttccagctttttcagagcagtttgaacaaatgaataaaaacttgagaaacataaaagatgcctaactaatacatatggcacatgcattataatattaaaagggaagaattctcaacttgttatgtacacactcaagcttttttttttttttttgagtattcaattagcagaataaccctacagaatccgtcaatatcctgtcttcactgtgaacagaatagaaaattcctcttcttttttttttaatgactgccaaaatctagggcacttggtgttgatgcatgactaattactaatgtttcaacagagtaagtcagattcaaattgtaaaggcacacaagtgaatttaaaacctactttttcattctttgataatttctctaccaatggaggataagaagagatgatgccggtttgaaattcctgacaaaaacttaaaactgcttttaccctgtctggtatactattattttattctaactgtgagaaaagtagtaatgagatcatcctatttcaactaccgtgactttaaagagaacatgacagatacaatttttcaacaaattaggctgttttctgaaatactaacaaagtttgccttttcagaataaaatgttacaagagctgcttctggccctaatgtgcccttatcagcgtgtgtgtttttaatgtggttaaggtttaacattcattccagcttcacctatagcttgttggtatgctttatcaccatggattttaaacacactgaagaaaataatttctacccccaaaattattaaagcccctacaaggaactttacactttcaaaaaaataattattttcaaatataaacacctctttatatcttgacttttagatccctataaaagccaataagacaaatttgattcaatgggaattctttgtactggcaaaaaatattacatgaacgataatataggagaccctctgttatgtaaaattacgctatttattactttagcaagttccaatagaataatcgttgatggccctgaggtgtcacatgatcctgaattacttaattgttacatatattcaggaaaataataatgttaactgcatcatgctctagtctaagcttcaagaaattggtaatacaaatattctatataatctagcattctacctaaatatttgatcatttgtgacaactacattgaatgagagtttaccatacttttttaacaaaagaaaaaatatagcttagttagctattgatgagacctactagaagaaattaaaactcatatcttatgatttatcacaaagcatttgagcacaaagcatttgaatttgatgttaattcaccttggctgtgactcactgagaattctgggttttacagatgggtagatcacttccttttcatgtagctttttttaatattgttgacataagagaatctgaagtatcatttcttcacatcctatttcacctgtcattgtcatctcaaaaatctattttctcttgcataaaacctcagtgtttaaagctataaaagcaaacacagcagtgaggaaattttcccctgggtctatttgccatatgctttaaaacagaactatttgaacaccaaaatcagcattcctgaacttgcgtatagagacgtttgttttcttttcccacctgcataagggtaaagaattcaggcttgcagaatatcctttgaattctaaaaccttgctgaaaaatcatttttatactgcagagtgatgactcttgctaccttcttatgattggaagggtttccaagagaaacaagatggacttgacttctcttggaaatataactcagagtgtttgagagatttagaagttattcttctgttactttctagatattcacttttaattataagtaaaatatgtttcagatccaaacaatggtgacttcattcattcattcattcaaaaaatgagtgtattatgttttcactgtgtttccttcacagatattcttggcacatcagataacacagtgaaaaaaaaacagatgacaaatcgtcaccttctaaagcttatattctacagggggaataaaaaaacagaaacgtatacatacacgcatgcatatacacacacataaatttaatagcatgacagatggtaatactgctatggaaaaaataaagcaagaaaaaggaatagtgagtttaggatgaggtttggagggttaaaatttgaacagaaatttgaaggagatgagagtacagatatcatgctatctgtggggaagattgctccaggttctaggactagcaggtataaaaggaatttgctggggaagagcacggaggaccatgtgtccagaaagagaagttaagtaaccaggagtgaggggcagacttattgaggctgtgtgcaattaaaggggatgttgactttaagtgagagggagggccattagtggcatttgagcagagcaatgaaatattctacttaaaaaaaataataagctaactttagctgctatacacaaggaagcagaggtgccacttaggagattattgagtattttaggaagagatgagagtgtctcagacctgggtgatagtgatataggtgatgagaatcagacagattctggatatagtctgaagtttgagacatttggcttttgtattcaatatgaaatatgacagaaaggatgagttgaaggtatttgatttgagcaaggaagaagttgcatttattaagatacaaaagaatgcagaaaaagaaggcttgggggaaatgtcagaagttagctctagactcttgaagttttaaattcaaaataaatatccaagtgagtactactcaatctattgagtagatgattgcatatctaagtttgaatttcagagaagaggtgtatactataaatatatatgtggattttgtcagtgtggaattggtatttaaatccaggggtccaattaaaatcaccaagagagtaatgtagatagagaatgggagatgtttgaagactgagccttgggatatccaagactcatagtttgtagagatgagaaaaaccacaaaagaagactgagaaggaacagccagttaagtaagagtaaaatcagaagagtttaggctgtcctggaaggaggactgatgtttctgctaaagtgatgcaatgatattgcaaatgtaatatacttgaaagacaccaagaggagaggtattggaggcagtacatttttgcttaacaaaaaagcaagggaaaaggacagtagatagagagggatagtgtaaaaaaaaaaagctgtataatttttaaagagagggttattaatgggtacaaatttacaattagctagaactgtaaataagacccattcaatagctcagaagggtgactacagttaacatttatctattgtatatttcaaaataggtaggagagaataaatcaaatgttactagtataaataaaagataaatatttaaggcaatggatattctgattaacctgatttgacctttagagattatatacatgtatcaaattatcacttgtatcccaaaaatatgaacaactattatctatcaatttaaaaagttggctaaaatagcagtacttttgttggaatgaattcatagaaaaataaatgataatgtatgtgaatgaagaatttctggagaattaaatttctgcaagtaatgatggaatatagtatacaaatgggtgcattgccttgtatacaagtaaggatagtttatccagagtgataggagaggtctatgggctcattcacaggtcagtctgtgaatattgtgatgaaggctttgggatattttttctgattcttttattttcttaatgaagtaagaagctgagaatgagaaagtgtagaagcttaagaaggaaatgttaggcaatagtaatcaaggaaaagaaggagagtgaatgaaatagatgtcagtagtagaagggcagatggcaacagaggctcacatgggtttaagggtcatgaagaccatgcttcatattgttaatgtttttctagagccatatttgaccatgggtaggaggagtaatttaaccattgtatagagattctccaactgtatataaggcagcaacagagtagcaaacacaagtaaataaatgtaatgaccaattatgggggaggagcaaattaagagcatgaggaagagagagaaggcaaggggcagaatcagtacactgtaagttctaatgctgaagttagggtactaagagtgaactctcaccttctctatgataacatccatatttacataaaatctgtacacaaacattctgatacagtatagcatcttccattttccattgagaatgattctcatccatttgtgctattcccattttgcaaggaggaccttcttatgttgggaaattttaatgattataaatgctctgcatataatccctgctgacggaatctatgcttcattgatggatgaatgtactcaatcatgatgcggaagagggctacatggtaccttccaccaacagctactttttctattcctctctctctctctttaaatattttgcctttaaaaaatatatcttcttaccatttgacgcattcctgggaaggctgttcttatcagcagacattgctggaaataaagagagaaattgtagaaggaagaccagttattaaagaacaaaatgtcgatagccccaaagagaggtttaattttaaaaagcaaagctaaaaatagcaaaaatagaaaaaacacaaacaacaaaacctctaaaactctgaaatgcgtgaaagagtacttttcaaatgcaagcatgcatgctaacttcacatttccacccctacttatctctcccacacttgagcctcacagctcacatagccgcctttctcctgagtatgacagctcaactcccagaacagcctatcaggtcacaaaccataactgatcatttttgtgtgcttcttagattctgtttgcctggaagcagcttttcttttaacattatttttctcctacagatggaaatggaagagaggagaataaaaattcaagtctaagactgagaggttccataccagcgagcctggcaccaggttgagcatgtatcatagggaaaagttagagaccacacaagcctctgtggttatactatgctgcagagaagagggcaaattaaactggaggtccaccttacaagaattttgtgaacagctgaatgttataactgttatgaatacctgcatcacctaacttaaccacatgaaactcactcgtgaattccctactgtacacatgtcagcattctgaggttttagtgattttcttaaacaccagaatactaccaaggggtcactcaaaatgcagtgctgggaatgttgtaagaaacagttattccccttatttaaccaaattttctgtcacaagctgcataattccaagtttctggatcttatttaacccttggggaaaaaccagtccttgaattaaaattaaatataacattattcctgaagtattacaggattttttttttatttcttgaaagcggagtattcataattactacttttttttttttttttgagacagcgtcttgccctgttgcccaggctgaagttcagtggcacaatctcagctcactgcaagctccacctccctggttcaagtgattttcctgtgccagtcccctgagtagctgggattacagttacgcaccaccaagcccagttaattttttgatttttagtggagacagggtttcaccaagttggccaggcttgtttgaactcctgacctcaagtgatcctcccacctcagcctcccaaagtgctgggattacaggcgtgagccactatgcccggtctcataattactttgatctccctctcatataattaaagaaatcattctatcatcttttctatcacgttattctctttacacatttgtccgatttctttctgctcctctgtagtgacagttttaaaatcttcatttgttattgcgttattatatactgatcaaaacaccaaaatatactttgtgctaaacatttcattgtgcactatggatgattacaaaatcaagtaaaaacacagcttcagctctgaaggtatgatacagataaataccactgtgaaaattttgtgtgattaaagataagtgagattattgaagaaagtaggttttcctagagtcaggatttgaagtaggggttattcacagaaagaataaaaaaaaaatttcaaattgcaggagacagtatgcagaaaagctggatttgaccccgatgacttgtccccatcccttttatttcagcaatattttcctttcaactaaagcaccaatgcaaattataccagttttttctctctgtagattgtgtggcttgaggaactacggtgtaggaaccaatcagtgccaagcctccctccccaaattccgcctccagtctcccttccttcctttcttcctcattgtctacagagggtgcccagaaaagaatcttattgcctccttttccaatgatttacaggataaattccagatccttagcatggcccacacttttctctgtgttgtggccctgtttcactaacgttaccttgctcggctggcagtttcatttctccaaaatgacttttttccctgtccaccaggcaaactgcctaatatttcaagacgtaactctgataccaccttctatacaaagtcttcccttaggcaaaatgtctaatcttttctctacttctttaaaaccaaacaggtttctttcattttattgcatttctgtgtagctttcctctgagatttttgaagtcaggggctcttcactcagcattacatcaatacatcattaccgaccaatgactatatctcagacattgtaccaggcatttacgatgatggtgaccacaatcatacatagactcttgcttcatgaagtttatcgagtaacaaaaaaggtatccacaaataattacacaaataattaatcttaatatatcataaaggaaaattacacagcaatatgaaaacagatcaaggagagcaaatagattctggactgttggggtgggaggcaatattaggagtcacagtttttatgtatatatgcttttcttttgataaattagaatcatttataaaacttttaaagtttttctttcaattatcattgtatatttgaataatacaattaatcatccactttgagttgtattgaccttaaattgtgtattttgattctccactgtacagatgaaaaaattatattgtatttgcaatgtaattattgcttattatacttccccctactctgcctcaaaattttggttagttatattattatttcagcttttctagcagttatctttatatagcggtgaacttgtgactggcttttaagtccaaatccaaaataaattttggttgataatttgtgtctgttaatgagtaaaacaaagggaaaacattgaagatgaatgtcagaacttcactcattcatcaaagatataaatgacttaatcatagatcacattaattcaattggattaatttgattaattaattcaattatgattgcttgatcatagattaggttttaagttctgaaaaaagattttctcaattttttgtactattctatatgtaatgactgtaggcacaacacacttttaagtttcatctgtattattaacattttttccgttctctcttcagtttgacagtcaaaaaagcagtaagtcaaaccctgatttgcagcatttgtcaatttccatggtataaatattccctgtgtggcttatttaaagcttccagcctaccctcatggaatgcagagaagagcacagagagataatacatgttatttgaaagactcaatattatcacaatatctactcttcctaacttgatctacagattcaatgcaatccgaatcaaaatctgagtaagctattttatgaatgttgacaaagtgatcaccagcagcataccacaatgtaggatttcccccacacatttgcggtgtcaagagcatagatactagtaaagtgtagtaaaatccgttaacttatttacttgcaaatgtatatgcttaatattttcaataagctttattttattatcagagaagttttaggtttacagcaaaattaagcagaaaatatggagtttccatattccctcatcttcacacatactcagactcccctactatcaacatcccacaccagagtggcttgatttgttacaatcaataaacctacacagacacatcattatcaatccaactccacagtttacattagggttcacccttgctgttgtacatgcgtgggttttgacaaatgtataatgacatgtgtctactactgtagtatcacacagaatgttccactgccctaaaagtcctctgctctggttattcatcattccacttctccagattctgacaactattgatctttttactgtttccatggttttgccttttccagaatgtcatatagtctgaatcatacagtattgccttttcaaattggcttctttcatgtaataatatgcatttaagcttcctttgtgtcttttcaaggctcaatatctcatttcattttagcattgagtaatttgtcattgcaatgtaccacagtttatttatccacttacctactgaaggacatcttgattgcttccactggcaattatgaatgaagttactataaacatccttgcacagacttttgtgtgaacataagttttcacctcctttgggtaaataccaaacaacactattgctgtatcctatggcaagaggaagtacaggtttgtaacacactaccaaaaactatcttccaaagtggccataccattttgcattttcaccaacaataataagagctgtcattgcttcacattcttggcagcatttcgtgttgtcagtgttgcagattttggccattctaataggtgtgcagtagtatctaattgtcattttaatttgcatttctctgatgacatgagcattttttcttatgcttatctgccatctgtatatcttctttaatgaagtagctgttaagatacggaccatttttaattgagttgttttcttattattgtgttttaagagggcttttttcggtatagtttggatgacactcctctatcagatgtcttttgcgtaccttttcctctagtctttgacttgtctttttattctcttgacatgctccttcacagagcagaaaatttaattttaatgaagtctagcttgccattttttccctaaagtgtgccttagatgttgtatctaaaaagccattctgacaccataggtcgtctagattttctcccttgtcatttctaggagttttatagtttagcattttacatttaggtctataattcattttgagttcattgttgtgaggggttcaaggtgtatgtctagattatttatttagttagttagttattttgcttgtggatatccagttgttccagcctcctttgttgaagaaaactatcttttcttcattttagttccttcgtcaagatcacttggctatatttacacagatgtattcctgggttctttgttctgttcagctaatctatttgtctaatcttttgccaacaccacactgtcttattactttagttttatagtaagtttaaacttggatagtgtcagtcctccaactttagtcttctttaatattcttggctattttgggtatgttgcccctttacataatctttaaagatcactttgtcaacattcacaaaatagcttgctcagattttaattgggattgcactgaatctgtagatcaaagtaggaagagtagatattgtgataatattgagtctttcaaacaatacatatcagctgttcatttcgttctttgatttctctcatcagagttttatagttttcctgttatagctcttgtgcatattttgttagtttatttctaggtatatcattttcggggggcgctgatataaatagtattgtgctttgaatttcaaatcttacttatttattgctggtatatggtaaagtgattgactcttgtactttgaccttgtatcttgcaaccttactacaatttcttattaactcagatagtttttttgttgttgttgttgattctttcagattttctacatagacaatgatgtcatctgtgaacaagcacacagttttatttcttcctctccaatatgtataccttttcttttattttcttgtcttattgcattagctaggactttcagtacagtattgaaaagcagtggtgagaggggacatccttaccttgttcctgatcttagcaggagaacttcaggtttctaactattaaatacattagccgtagattttttgtgaatatattttatcaagtaggaagctcccctttattactactttattgagcattttgttatgctttgttttttaatcatgagtgggtactggattttgtcaaatgctttttctttatctcttgatatgatcatgtgatttctcttccttaacccattgatatgatggattacattaattgatttttaaatgttgtaccagtcttgcatatctttaataaatcacagttgttcatagtatacagttctttctatacattgctggattggatatgctaatattttgttgaggatttttacatctatattcatgagagataatgatctgtagttttcttttcttataatgtctttgtctggttttggtattcctcaaagtatgagttaggacatattctctctgcttctaccttctagataagattctagagaattgatataaatttcttctttaattacgtggtaaaatttaccaataagttgatctgggcctgctgtttcctgatttagaaggttattaattattgattcagtttctttaatagatacaggcctattcagattgtcaatttattctcatgtgagtttttcaaagaattggcccatttcatctaggtcatcaaaatagtggatttagaatttttcacagaattcatttgttattcctttaatgtccacagaatctgtagtgatggcacctctttcatttctgctagtagtagttgatgccttctctctccttttttgtcagttatcctggcaagaggcttatcaatgttactgatctttttgaagaacctgttttcagttttgttgattttctccatcaatttcctgtttccaattttattactttgtgctctaattttcattacttttttttctttgcctactttggaattaatttactcttctttctttagctttttaaaaaactaaggcagaagtttatatggctgattttagatctttttttctaatatatgcatttagtgttacaatttccctctaagcactcctttcactgcatcccacacattttgataagtttggttttcattttaatttagtgcaaaagatttttaaatttttcttgtaatttattttttctaaataacacatatcttctttagaagtgtgttatgtgatccccaaatattttgaaaatttccaactatctttcttttattgatttctcacttaattctattttggtctgagagcagacactgtatgatttgtattcttttaaatttgtatgtgttattacccagaacgtgatctatcttgttgaatattttatgtgagtctgagagcaatgtgccttttgtggctgttggatgaagtagtttataggtgtcgactgtacctagatgatctagtgtttttgagttcagctatggccttactgattttctgcctgctggatctgttaatttatggatgaagggtatcgaagttgccaactataacagtgggacttaatctaattctctgggcagttctatcaatttttgctttaagtatttttacattctggccggcaccgtggctcatgcctgtaatcccagcactttgggaggccaaggtgggtggatcacgaggtcaggagttcaagaccagcctgaccaacatggtgaatgaaacactgtctgtactgaaaatacaaaaaatagctaggcttggtggtgcatgcctgtaatcccagctactctggagactgaggcaggagaatctcttgaacccgggaggcgaaggttgcagtgagctgagattgtgccactgcactccagcctgggccacagagtgagactccatctcaaaaaaaataaaaaactaaaaaatttttaaaaagtatatttacattctgttgttagaaaacagacatatatattaagaattgttatgacttttggcagggaggattgacccctttatcattatgtaatgctccactttcctgacaaattttcttgctgtgaaatctgctctgtctgaaattaatacagctacttccactttcttttgattcatgttagcatgatctatgtttctctatccatttatttttaatccatatttgtctttacatttaaagtgaatttcatgtacaacacatattgttaggttttggttttttattcagtctgacaatctctgtcttttaattggggaatttagaccattgacatttaaggtaaatatcgatgtagttcaattaatatctataatacttgggtttggttttgattttttgcccttgttctttgttcctgttttcatctttcacacatttgctgctttttgtggttctgaggattttatatgactctatcctctctcttttcttagtgtctcaattatacttctttgtttttacttcttaagtggttgccctagggtttgcaataaatatttgcaactaattcaaatctgctttcaaataactgtcacaggtagtgcaaatactttataataacaaaatattttgaatccctcctccatatacatagagtacattattattattatcatgaacaacctgttgtctgttagataaattaagaataagaaaaataaaagtttttgttgtgtcttcccttaatcattctttagcgctctccctttatgtagatctagtttctgacctatatcatttttgtttcctctgaataacttcatttaacattttttttgcaagtcagatctactggcaacaaatttcctctatctttatttgtctgagaaagtccttatttttccttcacttttgaaggatagttttgcagagtgcagaattccaggttggctgattttttttttctcccaacaccttgaatatttaactctactctcttcttgcttgcatggtctctgaggagatgtcagacgtaattttataagtgaagtgtttttccctccctctggcttatttcaaaattttttctttatctgatttaatgaggtttgaatatgatgtgcctaagcatagtttttaaattttcattttttggcatttatcctgcttggtttcctttgagcttcctatttctgtagtttgatgtctgcaatagtgactgagaatttttccaaattaatgtgtggtttggaagtttctgttatcacgtcctcacactcagagattctctcttcaaccacattcagtctactaattaaatgtcagtcaccaaagccattcttcatttctgttaacagcgtttttattccttagcatttcttttttgttctttcttagaatagccatctctcagctgacattgtttattcgctctgacatgtcttttttttcctattaaagccttctagcatattaattatactttaaaaaaattccttttctgataattccaacgtccctaccatatctgactctggttctgatgctaattcgatcgatctcgccaactgtggttttttgtttgttgcctttattaatgcagcgataagtcatgaggatgattttctgataatttcaacatccctaccatatctgactctggttctgatgctaattcagtctccaactatggtttttgtttttttgcctttattaatatagtgatacgttgtgggggagcggggaagcattctatgattaggtctcagtcttttggtgagcttgtgcctctgggctatggacttcacaagtttccgccaacccctttacgtggcacagggtgactggaggagaccacagctgtgcatttcccctcccctaggtaagtgaggctctgatacaacctcagaagattcagctctggtaaaatagtttctcctctgggtaggccttgttaagaagaacggaaggctgtgatgtatttcaaaatggtaacatttcctttctccctactagaagcaaaagggactcttttccaatatttactgtgagaagctggcagactcctggagaggaaacttgtagaagtgtgaggaccccctatgactgagtgccctggagttttcatctttcaagcttgtccacactcaacctccagaagttcgttaattacagtttagggtttcctaccctggtactggctcataatgagttttctgctcatggatttctgtttggttattaagttgtaattttccgtgtccacctgtctatctctccaatgttgccctgtggtttgctctatgagtacccttctctgatagattcaagaagagttgtaatttttcattttgctcagatttttacttattgttaggccagactgaagatacctaatctccttacatgccagatcagaaatcaggagtttatactttatttttcagttatggctttatttaacaactggtttgcaaatttcctgaaaatttaacagttgcctcttgtgagtttggggtgggaaagagaaggggctccaacacaccactacctttataccattacatcacatatttaaacatctattattgatagatttgttttaaaataatgtcagttaccaactgtctattaaatatgaaaaaaaatcatttcttctttcttcttcccccatccacacttaagcttttcatttcactgctacattttattatttaagtccaaatgacaggacttttttttaagacatggtcttgctctattgtcaagtctagagtgcagtagcacagtcatgctcactgctgtcctgaaccccaggctcaagtgatttccccacctcagcctcccagttatctggggctagaggtgtgcaccaccacactcagctaatttttgtatcttattttgcagatatggggttttgccatgttacccaggctggtcgtgagctcctgggctcaagcagtaccctgcctcagcctcctaaaatgctgggattgctggtgtgagcacattattgaataatatcagaaatactaaccaaaataattagaaaaagtaaataaataaataaataccttagaggaaaaaatcaacaacaacctttcaagtgaaggagtgggacagatctttctaagaaggaaacagaaatcagacattataaagcaaagattgaccaatagaactaaagaagaacttgataaatttgactacatgtaaacactaattcatatgagaggaaaaggggtagtagtgcccttaatacatgcttataacttaatgtttagattataacgatttaaaaaaagaataaatatatataaagggttatctaggtgacttaagcaagctgaacgggttggagttcatgcctcatccccactaaaattctattaaaaaaaaaaaaaaacgctttttaaaagatggctttcataaaaaggaatgagttcatgtcctttgcagggacatggatgaagctggaaaccatcattctcagcaaactaacacaggagcagaaaaccaaacaccacatgctctcactcataagtgggagttggacaatgagaacacatggacacagggaagggaacattacacaccggggcctgtcgtggggtggggggcaaggggagagatagcattaggagaaatacctaatgtagatgacgggttgatgggtgcagcaaaccatcatggcatgtgtatacctatgtaacaaacctgcacgttctgcacatgtaccccagaacttaaaatataataaataaataaataaaaagatggctttaatattacagaaaaatcacgaaggtagtttttcattttatttttaattttgtattgatgtgaaagtcacaaaatataacattaaccattttaaaatgaacaattctggggcaattagtgcacgtatcatgttgtgcaataaccaaaactgtctagtcctaaacatttcatcactccccccaaaatttctagacccagcaagcagttactccccactcccagctccttcagttcccagcaactgtcagtctgtcttcctctctctgaatttacctattctgaatattttatataaatggaatcacacaatatgtggctttttatatctggcttcttgtacttagcataatgtttttgaggttcatccacccactcttcttaatggcttttcaagttctcacactgacaatgtggaaaatgtattattttcctgctttattcatagcctttctttgcttttcactctctgttggtaatgaccagaatcatacctagtcctaagtggggctgaaatttttcccttcgaaggctttttctttcagttccctagttgtattaaaaaagtaaacgtagatatgtagagtaggtactgatatcagtaaggatatgatgctataatttaccatggattaaaatgattcagaaaaattacccagggttaagtatgaattattaacatttagtgaaatacagcttggggccaccagtgcactgttccaggagggctgttcacatggaggcccacagtcatagaaggtgacccaggtgcgtgtaactgcaccagtccattcccctcatgattacaactattttactttattcaactaaattttatacctatccacttcaaattcattcccagaaattgtactcaccatttgccacttttattctcagaaggtaagaagtttaaaagccacaaaacgtatgcctaaaagatgaaagaatggagtcacagtatgagtgctaaattgaagaaatatcagaaggaagaaatgaaatcacaagtaaagtgattgaaacttggaaacttattggtgttttatgaggagacacaattgctcccacagtgctatactgaagaaagtgccagcctccaaatgaaaagctgatataagagtggtgtgaaaccagtgttaagtattttgcctggaagaaattgcttagaatgagagcagtccctaaactccttagtatcatttagtatgtttacttataactattactcatcatttggcccgctgggtctccttttgtactggaacagccctgccaagggactccctgtcgtggactaattctggagagtggaacaccgctgggcagggggtctctgtgctgtgaaatctgaagctaagaggatggatggcatttagttgagtgcattcctccacggatgctcatttaatttttaaaaatgtctctgaactgctgggacggttcttcctggattttttgtagttctcttcagttacacacataactccttagagatgcattttgctagtgaggtctttcaatatgtcaggctcttttcatttaagcttagacattttagatgttggaccattgtagctgaatatttctcttcccttgccttcatgtaaaatgaccctagtgtaaagtataaacctggtttgtttgcaaggaaaatgcactcttcagtttcatgtttctgggtgaaggagtctgtcaaagtgctgcctgtcattactgataactgcagtaggtcagtttgctttactgtaacattaatttatcatgtgacttgtatcatgtaagtgtaagaatacagccaataaaagccataaaaataagtcaactgctaagagatatttcaatttttttagaaattcgctgggtgacttgtcattgatacattttattaaattacatatccaaacagagtatactgtgaagatcaggcgagaaatttgtcttctaacggcttttttcataatttccattaatccatattgtatttggtttcttactggaggctattttaagtagtcttttatcagaatcagagattttatactaatcctaccttttagttatgagcatttagaatattcgttaacaggagttgtaagttctcccaactaaacagacgtggtatattcagtttaacacagagcacatatcagaaaacttcattctagttataaggccgaacttcccttaaacctcaatatcatttgatcctcaaactaaaatcttttgagactaccagctatgctatgctttcattacggtgcggaaggaaccctgttagagacacagtatacctaagttttgggtccagctctctctaactgcctgcatgaatataagcttgttattgaacctgtttccttaactgagggaaaaaggatttgaagtagaacagtagttcttaaccaggagaccatcaaatcactttggttggttttttttttttttttttttttccgaaatatacttgtccatatctctctggcatccttcaaccccattctgatgtaatgaagctggggtggttaatttccagttaagtttgtcttggagagatgacatctctcgtcggatccacctctacaagatatgactctgaaatcacaagagctggggttgcagaatttgcagcagcaattgtatcaatggcatcaatattcttataaaaagtgtttatatctagttctagcaatgaaagtcttgaacagactttctgattaaaatcagaaaaaaatacaactttctgattaaaataaatgggttagctgtttcccaatctgttatgacaacaaacctatttctggaccaaaaatcttgatgtgtaatgtaatgtaagatatggtcccacatatgtttcagtaagaataaagaatatttaaaagtatagtggtcctcactagacttcttctcggtgggaaaattgtacagaatgcgagttctgtaacctctgcttcctttagtaaccccacctgagagccagaagaccaacagttcagaccagaaaaagtaatagaagcagaacttccggaggcttgcagatggagtgttaattggtgatctgaaaaaaagtgcttcatctctcttgtcgttaatgtttgggtctgcaggaaaggctgacttcatgaacatgtggcctgtgtagccacagagggccccaagttcagaaaggcctcgtgctgttgtaatgctctgctgtgatggtcttgaaatccttaatgtttttaaacaagggtcctgcattttcattttgtactgggctttgcaaattaggtagttagtcctgcttgtagcaatgaaactaacaccccctgccccggtaaaaccaagcagttcctatcatttttctgcttctttacttttgcctttaaggatcacttgttatttacattgttcaagcaatggtaagaagtgtcactttccctggctgcctcccacacttgaggcgcatagcaagcctgtcctcttcagttctgatgacctgcccattctaaccactgcgcctgtttcctgaacccttctccatacaccaaccacattaccaacctccccttcccatcgagagaagacgatttgcttcttaattcccagatcactctaattagaacactgcaaaaactgacaactaaagcaagtggccacctactagttctcacacactggactctctaacagtaatgaatttctgtgattatttccttgctactaataaaatactagctggaaaagtggtcaagtgaggagccaccagaattttatttcttcttcaagcatttaatagccaactatagggccctgggcatttactgaaaggcaatttcagttatgttagtaaattgctgtttaggacaacagatcaataaaataaattattaggtctataatttaggtatttacagagtaaggacaaaaaatactttttcactctgtgtattcaaagcagttgatccatgatttttggatacataatagctgtatgtatttatgagatacacgtgatattttgttacatgcatagagggtataatgatcaagtcagagtatttagggtgtctgtcatctggagtatacatcatttctatgtgttgggaacatttcaagttctctcttcttgctgttttgaaatatacatttttgttaactgtagtcaccctactgtgctactgaatattagcatttattccttctacctaaatgtatgtttgcactctttacccaacttctcttcgtctcgctcccccatgcacacacccttcccagcctctggtaaccattattctactctctacctccatgaggtcgatttttcagctcccacatatgagtgagaacatgcaatatttgtctttccatgcctggcatatttcttttaagataataactccagttccatccatgttgctgtaaatgacataatttcattcttttttattgccaaatattaggttggcacagcagtaattgcggtttttgcaatgataatagtattccattgtgtacatacacaacttttttgctgtttttctcaatgactctagagaaacatttattcgctaatacattttctttgtgttctctaacttaatgtcatcttttcatctcgcttgattttcatgcagctaaatcggaaatttgtcgttttctccctaaaaaaatacaataaagttctttcttataaattatattctctgattttcttgtcagcctgcttcaagaaaatccatgtgtgcaaaatacttgctatcagtttgccccataccaaatggctgtttaatccaaatatctgaccagcaaaccaagcaattccttctgaagaaagggtggttggacagccaaagccactgggtagtggaagagaagaccacccatcctgagctccccagtctagtgtgaggggaggacagctgatagctggagatgcagcatttccagatgtcactggtcccaaaccattatcagagtaacactggcctcatagaatgagttagggataattccctcttcttcagtctttggacggtattttcgaggagagctcttgtccgttctttgaaagtttgttagaattcaacattgaaaccattcagttttggactttgctctgttgggagactttttttactgattcaatctcactgctcattattggttcgttcaggctttttatttcttgctgattcaatcttgataggttgtgtccagaattttagacatgttctctaggtttttggtttgttagtgtatagtttttcataatggtctttaattatgtttttatttttgtagtgtcagttgtaatgtctcttttctatttctcatttttttatttgggtcttctttatttcttggcttgtctagctaacagtttattgatttcatcttttaaaaaaccaacttttcattttgttgatcctttgtatttttttaagtctctgtttcgtttagttctactctaatttttattatgtatttccttctattaattggggctttggattgttcttgtttctctagtttcttgaggtgcattagattgtttattgaaatctttctacttttttttgacataggtgtttatggctataaattttccccttagttttgcttccatagttttggtatactacgttttgacttgcatttgtttcaagatatttcttgatttcttccttaatttcttccttgaatcaatgatcattcaagagcatgttggttaattttcatgtatttctgcagtttttaaagtgtcccttgttactgatttctagttttattccattgtgatctgagaagatacttgatataattttgatttttaaaagtttcttcagacttgttctgtttcctaacatatggtctatcctgggaaatgttccatgtactgatgggaagaaggtgcattctgtagctgctgaatgaagtgttctctagatgtctgttaggtccatttggtcaagtgtgcagtttaaatccttttaatttttttgataattatctgtctagatgatttgtctcatgctgagtgtaaggtgttgaagttcccaactattatcgtattggagtctatctctccctttaaatctaataatatttactttctatatccaggtgttccagtgttaggtgcatatgtgtttagaatttttatatccacttgctgagttgatcctttttcatcatataatgatctttcttgcttctgtttactgtttttgacttaaagtctgtgttttctcatacaagtttagctattccgtttgtttgtgatttccatttacatggaatctcttttttcacctctgctttcagtctgtgtctttataggtgagataaatttcttgtgggtggaagagagttggctcattttttttttgtcttttcagccagtccatatcttttaagtggaaggtttaacctatttacattcaaagttattgttaatatataaaagcttattcctgtcatcttgttaattggtttctagttattttgtaatgtcttttgattctctttctctcctattgtttattatagaaaaccttctgtagtggtaacatttgaggttttttttttttttttccttatttgtgtgtttgctctaccagtgggttttatcctttcatgtggtttttatgatggtagatatcatcctatcacttccaggtgtaggactccctttagcatttcttataggaccaggctaatggtaatgaattccttccactttcacttgtctgggagtttatttctccttcatttatgaatgacaacttttctgggtatgtaatccttgggtggcattttttttttctttcagcactttcaatatatcatctcattcttcctggcttgaaaggtttctgctgagagattcactgttagtctgataggggttcccttataagtgactagatgcttttctcttgctggttttagaattctctctttgtctttgacttttgacagtttgactataatgtgctgtggagaaggcctttaggaattgtatttgtatgggaacttctaagcttcctgtatctggatgtctaaacctcttcctagactttgaaagttttcagctattattttgttaaataggttttctatcccttttgttttctcttcaccttctacagcacccagaattcaaacatttgatcacctgattgtgttccatatgccacaaggctttgttcattctttttaattttttaaaattatttttgtctggctgggttatttcaaaagaccgctcttaaagttcggaaattctttcttctctttcatctaatatattgttgaagctttcaaatgtattttttatttcatttaaggaattattcagtttcacaatttctgtttggtccttttctgtgatatctatctctttggtaaatttctcattcatattctgaattttttttctgatttctttgtattctcttgcatttcactgagtttccttaatatcaatattttgaattcttttttcaaggatttcataaacttacttttgattagaatatattgccagaaaattcttgtgtttctttgaaagtatccttgtttttccatgtttcttttgtccttacattgacatctatgtatctggtgtaaacatttcttcttccgggtttttgaatttgctttcctaaggaaggactctgttaaagatgaatctgtggtttaggttgggtaggacactttggctttgattctggatgcttgcagtagtgtaatcactgtgtgatttatttggctgtaaatagtatcagtggtgtcagtgatttcctcagtgactgcagtgtctgtgatttcctcagtgatttatgatacagtggaggctgtgatgaagattttctggggacagggacaacaggtgggcctgtcctcaaaccccactggtggccagtcacaggccaaacatgcctttccttgggccccagggcaacatatgctaatatacctgtgttagcaggctcaggcaggccattcttgggcctctaggtggcttgcccaggtgctggtagtggcaatggtgggccaggtgggtgggtaggttatcagacctctgggcagcagcatggaatgggtgatggcagtagcaatagtgagacaatcatctagctctgaagtgatttgcattgtttgttggcattggctacaatgggctgggaaggccagtctccagtcccacctgtggtatgtgtacgtgggtacccagtatggtgattgcattgttgtgggcattggctagaatgagctgggcaggcgtgaactcaggaccacagaaggagtaccctggtgctgatggtggtcaacttgggtaggtggtttccaggcccttggatgtcatgtctggacatagagtgggggagagagccaggactggtggacctgtcctcagacctcccagtggtatgagcaggtgccagttgtggtagacaggggtggagtgatccacatgtccccaaagaaatgtttgagagaaggcagcagctgcaaccctgctactggggaaggcaaggttgctttcagtggcagcagctgtatacatgtgtttagggaacacacattttcttcaagcttgaccctgggaacagcagtcacttgcagtgacagcagctgtgggcaggagagtttgttcatggggcacatgaaaatgcatggcagctttgttcctggggatattggggtcacagtcaatggcttgcacttgaatattggctgcaactagctgccagccatgacatgcattggctgcaggtgaggaatgtcaataggacaccagggatgtggtgatgcaggtaccgttggacctcccaggcaggatggtaggggctaggctttcaatatggtgacttgctgtagctgcctagggcttgggggcagagggtgtgactcagcttgagctctctctggagcaatgccttcacttggtctccttgcagcttcctatgttagtcttggggcccactaggtcctagggactctcctgtgtctaggattgcatgagttcatggtgggaacctggactgttgggggtcactcacttacccttttcctccactggggagccagcctctccaggttctcagccaatgctagccaagcaggcagcctcacttccccttccttttttgttttggttgtgtcctgtcacttatctgttgaattctaatgttctttcataaatgatctattcaaagtgtgatcatctattcactgtttttgttcttctctgtgtaagagacacgtagcagatgcctctagtcagccaccttgcaacccctctgccatgcagttaatacatgattttttctacttttggatggaattagataaggcccaagctaagaactccatacagcccattttgtaatatgatccagacacagagatgcactgttcagatcctcgttcaaaaaacgacccaccgcatagctgagagggatgtggtcagctgatgcctccagctgttagatccttcaggatctgtctcagttttcaaaccaaggttacgctcttctctcagtgatctccaggcaatggccgagcagaatgatggtacaagggccaggtcatcaacatcccctacaggacttctccatcaggttatctttactccagaactcccctttgagctggtaaagaattttagatctgcactgagatctgtcagcttcctatgcccaatcccgcatcttacttttttctttaattggttttacttccaataaaactcttgcaatcctaactccatctcagcatctgtttcccagacaacccaacttgcacaatgtccttacagtaatgcaaaaatgaatttcacagagctctttttgtaaagatgctgatacatgaagtctcaaatttcatggacgtgacataaggaaggcaacagcttgggaagaaaatatgagaaatagcacttagattgggtttattctagaagaaaggacacctcatctaactttctagtagtcctctataaacactgttcctctggactgggcgtttgatacataccgagcagccttgttttcaaggttagagtccctagaaaatagatgatgttcagagacaaacctgtctaggtactgagaactctttctacttgatgtctgattgccatctccaacagattatattttgggatgaattattcatctttagcacataagtaatctttcttattttcttattatctttacaaatcagtgtaatgcccagaaagcccagtgtacaatcaaaattttagttgcttatttttttcttttgctcctttatgtccaactagttactaaattatgtttatgtgtctttgaaatcttttgccttttgcttgtcataagatgcccaaaagatctgtcttttggccaaactccatggcagagataggctacagttgtacaccagtttgtacagtgtacaaaattgtacaccaactttgttttctttttctcctgtgcaagataaccagctggcatcctacaaaacacacatgaattttaaatagaatttgtgaggaggtattgtttctgcatgttggagttcctgtaaattacatttacaactctttattggtatcataatgttgatggagaaatagatctcctaggaatatgtgcactgaccattcaactatccccatagctaacattttggatgcattttaagcttcttagcttagcacataaatcccatcataatttatcctctgtttcccaccatcaccactcctgaaacacagcctcacagactatttactctagctataaccagttataatgcttcatgcttcatatatgctatttatcttttcaagaatcctttcttttttgccttctgcttaaagacaacttctacaagccttcaaacctcagcttaagcattacttcctatgtaaactcttttgtgatctcctaatttgactctttttccctaatgcatttatttccattggatctcttttatacttttatcataacattgactataccgttccctaaatgttgctcttttagaactataatcctatattatttgacttcatatataaatgtgctctaaaaatgttgaatgaatatggtgagttttccactttgatatcttcatgctgtcttttaccccagggcctcaaattagccatcagaacagatggcttataagaactggtatgctaaaaagtaggtttaactgtggttgtggacatgcttctttctcaggggttccatttctgaagtggaaattaatttgatgcttctctagagtgatgttcagattaatgttatgccatttgtaaaggcctctaggactctcagatgaagggcatttgatattagcctcattgttactcgaagctgttgtagggttcatctatttgctactcagcaagacatttgacattctcgtaatacagcacatcccaggattaattaagagatttccggaagtctcaggaatacacctactttgacatcaatgtgctgtgaatgttgatcttggtagccttactttgaatagctatagggtatttaaatagtaacctaacttacaattaagactgcttagtccctgtaaggattctgagtggaatttagcaatggataatgaatatattctccggagtcttatactgaatttgaaaagaaacccaaattcctgagctttagtcacttaactacaacatctttctacataaagaccataagctaagaccatagaagagagagctcatgcatacatgagtacagatggttaccaaagtaaggatctaaaattggactctgctgtactcacatcgaagctcccaatgtacgaagggatgaccttccttcaatggctttatgcaagggtcaaaatgtatttgaactctggagcagaaaagcactgctctataggatttccaagtgttcattatttaggaggtcaggaacgatgggagcatgtggcaatccagacagctgcagtccccacagacctaaaagaaaacagctgccagagcagccatttctatacaaaatgtctcatgaccagaagctatggaaataaacggctagaggcagctgtgcttccctcttgctaaacactcaaagattccatttttaacacaggatgtctattattaagacaatcagctaagatgtcaattcaaaagccacaaagttctgcaacataaatactgtactgacttctctcttctgttgtgtgggaccatggcttctttccctgtatgctggggacactacttcagaataatcaagtgaaaatactgcttttttatggtaactctccattcaagaacttattataatagtgttataaaaagactgtaatcttatcataggctgtatttgaaaattaagatcctccacaatctggctctatcctctttctcaaatcaatttctcattactctcaatacaaatgctatccttcaggtaggtaagactcttcattcttgctccacgtttcttactcacgttccttcaggcaaaaatgccctgtcagacacatgaaaaaaatgctcatcatcgctggccatcagagaaatgcaaatcaaaaccacaatgagataccatctcacaccagttagaatggcggtcattaaaaagtcaggaaacaacaggtgctggagaggatgtggagaaataggaacacttttacactgttggtgggactgtaaactggttcaaccattgtggaagacagtgtggcaattcctcaaggaggtagaactagaaataccatttgacccagccatcccatgactggacatataccgaaaggattataaatcatactgctgtaaagacacatgcacatgtatgtttattgcggcactattcacaatagcaaagacttggaaccaatccaaatgcccatcaatgatagactggattaagcaaacgtggcacatatacaccgtggaataccacgcagccataaaaaggatgagttcatgtcctttgtagaacatggatgaagctggaaaccatcattctgagcaaactatcgcaaggacaaaaaaccaaacaccgcatgttctcactcataggtgggaattgaacaataagaacacttggacacaggaaggggaacatcacacaccggggcctgtcatggggtggtgggaggagggagggatagcattaggagatatacctaatgtaaatgaccagttaacgggtgcagcacaccaacatggcacatgtatacatatgtaaccaacctgcacgttgtgcacatgtaccctaaaacttaaagtataataataaaaaaatttttaaaaatcccctgtcagtcctctctgcccacccttttgacatttgatggtaaagcccaatctttcctctgcccacattagtcagtgatttctttaaatttcatttataacgatccctaaacctcataattccgcaaccaattacatgctagtacacgtgattctctaatctgtgtattttaatctcatctcctaagaacacggtggcaagatctgtgttatttactttgaggctgcatcccatttttttcttttgtgtttttttaattgaagtgaaatttgcatgtaataaaattcacccttttcagtgtacatttctatgagttctaagaaatgcatgcagttgtataatcaccactacaattaagggatagaacagttcgaacaccctaaatattttccttgtgactttgtagtcaaacctctcccacctgcagccactgataacctgatccatttcctgcctctatagttttccatctatgaaaccatgcagtatataggcctgtgtgtctagatccttttacttagcataatgcatttgtgatcattcatgttttatgtatcagtagtacattcctttgtattttgggtaataattcattgtatggatacacctagcatgtttatacatttaccggttggagaacgtttgggtaatttccaatgtgggaccataaagccactataaacattctcacacagatttttgtttgaacatacgttttcatttcacttggaaaaatgcctgggagtgggattgctggattgtatggtaagtgaatgtttaaattgatgagaaactgctaaactgttttctatggtggtgtagcgttttgtttttagaccagcaatgaatgacagatccagttgctcagcatcttagtcattctaataggtgtatagtggtatcacataatggttttaattagcatttccctaatgactaatgatattgagcatcttttaagtgctcctttatgttctatattttttggttatttcatagtactagcaaagtactaacaatgtattagatgcttaacgaatatttgcagattgttaaattgcagatcattaatactactctcttttgcatgccatttgcatcccattactagctgttaccatttattgagtacctactgtatgccaagcgctgtagtaagtgctttatatatggcatcttattaatacacataagaaccctatgaatgtgctgggtggtattgttcccatttgataaggaaaagggacaaacagtgctgacttgtgactctccaaatccttctctttccccaggaattttgggtttgcttgttcaggttctggaaggtttttatactactgctaaggatgagtgaagaggtaaatttaaataatccaaaacaggctgaaatgatccacatgataaagagataatttagaggttagtggggccatgaggaagaaagggaaaagtacttgggagaggcaagggaagtatagttgtggaggtagaagagagagaaagaggttctttgtttgtgtgtttgtttttgtttcagtttttgttcaaaaaaaaaagacaagagggagcaagaattgtgaagaagactgaggggttagagggatgaagagagtgtttagtatgctaattatgaaatattctctttttggagtttttttgagtgaataagattaaaacaaggtttttagggaaaaggaattggatttttttatattgatactagtataagccatagagcttattaatatttcaacagttatacacacccttacttgtgcacgtgtgtgtgtactcatgtgtatgtatatgtagttttatgcagtttattaaatgtgtagatatgtgtaaccactaatcaagatatttaactgtaccattaccagaagacttcattcttcattgtgctacttatttacagcggaatctacaccctcatcccttacccctggaaaccattaattgttttctccatatctataatgatgttatttcacaaatgctatatttataaaagtatgaagtatgtattcttttaagatttttttcacccagcaaatttttttgaggttcacgcaagatgttgtgtgtatcaagttcttcctttttcttcctgagtagtattccctgatatgcatataccacagtttgattaattgttcacacattaaagaagatttgagtagtttatgttttggactattaataaaactgctataaaccttggtttatcaatttctgcatgaaattaagtcttcctttatctaggacaaatgtccacatgtataattcctggatcacatagtaagtccatttttatttttattttaaaagaaactatcaaactattttacagagtgactgtactattttagattcccatcaggaatgtatgagtgattccgcttatccacatccttgccagcatttgatgttatcactatttttatcctagtcattctgataggtgtgtagtaatattttgttgtggtttccattttaatttctctgatgactaatgatgccaagagagttgtcatgggctaatctgccatctgtatagtctctttgtatacacgtcttttgtccattttctaatttcatgtcttttgcccattttctaattttatggggtttttttagtattgaaattgagaattatttatatgttctagatactagtactgtgtgagatagatgatttgcaaatattttctcccagtctgcaatttgtcttttcacccttaacaggctcttttacagaatactttttttttattttgatgaggtccaatttatcaacttttcttttaatcatctatgatttttggtgttaagtctaagaactctttccttgtcctgtatcttgaagattttctcctatttctttttctagacattttatagttttgtaagctgcgcacttacatctatggtccatttttagttgatttttgtataaggtgcaaggtttagatcaaggttcatttttatttagctagttagctatttgcctataaatcattgcatcgtcatttattgaagacttttcttcctccatcagattgcttttgctctatttaagaaaactaattgggtataattaggtttttatttctgtgagatgcaacttgtaccaacactggtcacaagagagccagttcttactctggttaaatatggatcaggaaactgaaactcagtttaagtaacataatatagcatgtatccacctactacttggctgtcctttttacaaagtttgtaaatgccatgttgaagttaccttgttttctggggtaatacccaaggtttgttgtcttatgtcacagatatcgaggatgcagacacacagagtgaggttaacagtgaacgtttaataagcgaaagaaagataataggtctctgctacagagaacggttctggaaaaatgggttgccagtccacagtgaaatgccaggggctttataggtgagctggtggtgaggcagagtctgatctacatagggcacaaaaaaactggttaggactaagtgtgccattggcatagggcgcaaatttctggcagctcccaccctaagcttttattatgcaggcgagttctctgcctgagctgagccatgttgccaatttctttctttctgtacatgtgctaaccaaaaagggaagatggagcttccatggtggacatgcctggcccccaggtagcccttttctattgacgcagctaccggcatcccccgtgcaagcttccagcttccttatctatgtttgcagctcgatttttcaggctgctgtttgtcaggaaaagaataatttcttgggctgctttttgttagaagggaagttctgccgaggactctgttgccctcactatctgccgaaataatttctttctacattctgtatcagtattgctaggatcatgagttggacagtgtgttacacaattttttagatatcaaagtagtatttatatgctttattaccacagcaaaactaacccggtgctcagcttgaggtgaactttacattgatacctttcccttctctaataaagcaagtagattgggagctacatgcttggcaaatacataacaatcttcttggtatgtttccaaaatattttgacaacaatatcagtggaattcttggagcttatcaccaaaatctgggtgaagtaggcctttctatttctaaagaaaaaaaaaggagagtcaatcacctttcctttaggtcctatggctggtatttaaaaggctgagtaactatgatttaaatgaaatgtcgtatttttaaaacactgaaagctgcagtgactacaggcctggggaggttcactctgatttgctgcccatcagatctgcagaaggcacacactaattcccgaggcgcagcattgtaagacttaacacggccaacactaataattaggcctggttgaaaagtggcagagaaatgctcaatttaccagcagtatcctcacctaatttcatatatattttctaatttgactttgagttaggcagtatcccatttcatggaaatgggaaccagattcagaggagggaaatagcagagtaaaatggcagatctgtatctgactccatagctaatgctccaccttggggttttatttcttccaatttagaatttacggtgagttatagaacttacactgcaacttaagttaatatcaaatcacagaatatttatcctggaagtaactccagggtctcactggagagtcttaatgttaaaatatactttcatactattgatgaaaaaaattttgaggagaatttaaaaaagcaaacagccagacatgggcagggcggggcacatgcttatagttttagctgctcaagaggcggaggtgggaggggtgcttgagtccaggagttcatagtgagttatgatggtgccactgcactccagcctgggcaacagagtgaaaacccgtctcaaatacataaatacatagcaatgtaaaggtagcgcaaatagcctaatttcctctgttttttttttctgaattcactcatattactataatagtaccaattatatactttattatatctaattgtactcatgtcccttgtaactaaataactccttgaaatcaaggataaattcatagtcatctttgtaatcatattgcttgatatagtatctgatgtatgaatgttaacgtcagcatgattaattgtaattaaatgtgcctagccaagttaatttatttattttactttgaccgtggaagcacagttgtattagccatggaatgctgcctcaaatacctttcatatataggtataggtagggtaaaaagctacacagaacattactaaactccagctttcatagtcatttgtatgagcacgtactacacaggcaattaatgtaactgtagctatttttatacatggaaacactcttaagggaaatgatcagtttcttaattaacttgtgatgaaatgcatgatgttgttggaaaatatgtattctgcctggttttaactgactctataatattattaatttattaatatttccagtttttgcataagaatcactagtactttttaaagtgaacctcttacaaaacaaaatatatttcagtctttagagagttaagtcattagacatagcaagttcaaaaagcaggatttgagatcatttttggtaagacctgttttgctgactcttcttgttatgcaaatggcattttctcagttttgtatcctgggtaccatgtaaatggatagagaatgatgagggttgctcactgttggttcctataaaaagtaattactaaaaaacataccacatagccatttacaaatatgactgctaagtttatattgcagagcagcacttcctgagcccaatgtaataatggcttaatctaattacatacacatatgcttgttaacacatgtaagtttccagtacacaataatagtgctctatatctcaagagctttagtattactattgcactgagacataaacactttttaataactgtcctttaaggattttcaaagaaaaaacaatctatgaaaaactctgttaacagggagttcttaggaagaaaataaggaataatgggcataaagagatgctaatattttgtgattgtcttgcagcaaaatgttattaaaagggatagttaaagaggttattatttcacctttgcaaatactaatgggtgctcttgcctccttcattgaacttttagctctccaaaggaattgcagtggtcagtttgttgcagaagctgggtacctaagcactgccaaatgccccacccacagatctctactccaactgcaaacaagcccaggaaggaatgttttttctctctctctcacattcgatacaactgctcaatctacttctctctggtagacatagctccaaaaaccaatgactgattgaacaaattaaagggaatcctgccactagaataaaaattattctaatctggctggtatttttattaattatattcttacataacaatctggcagaatttgagtgaatctgccagcttctgtacacagacctcattgtctctaaatgattcacctaactgccagtggtcataaatacaataataacaacagcaaccaccggagcaaattaaaatgttttacactggtaaacagcgtaactgtttggctgaaactgtcacttaaaatcttaaattatctcactaggtaggggtatgaaatttcaacacaactagggaactaagtctaagctatttaatatttgaataatattaaaaacaagagtaaaatacttaaccatgctgtaatttcccagcattcctcttgtagccacccgcactgtgacttttgcctttctctcttttttcacttccattacctcctctgtaattgaagcatccacctctttatatttccttcaacagacaaggttttattttccatgtcctttaccactactgtgattgaagatttcctactttctctattcccatcattcacatcaaagttaatatgttcccgccttgtaacacacccaccttgtacattttaattaagacaggcactcctgtattctgtgtgttcatcacctgatcttcactcatattcttctctttctgtttttttcttatactcaatgactattttcactcttccccaagattcacgttttataaattccaattttcccaaagcgaagtgacacacatgttccttttgtctaaactgacctgtatgctaatgactcttaatttcattctaagaaaagaagaaaagagaggaaaaagagcatttatggtatacaaactgtataagcatgcccactagacatactgttatgtctgtgggagataagctgttctaaaaataattcctcaaaagcaaatagcagactctgaaggttaatgtaatatgtacagcattcccatttcctttctttctgttgtgttgaggatcaccaaacaagctaatagccctcaagtgtgggatcacgttaaacaaaaacaggacattttgattcatggatgtgccaagttacaaagtttatcctttcaaaagtttaatgctgagtgatatggttaggctttgtgtccccacacaaatctcatcttgaattgtaaccccgtaatccccacgtgtgaaggaagagaccaggtggaggtaattgaatcatggggacagtttcccccatgctgttctcacgatagtaagttctcaggagatccgatggttttataaggggccctccccacttcactaggcacttctccttcctgccgccttgcgaagaaagtacctcgcttccctttcaccttctgccatgatgaggcctccccagccatgctgaactgtgagttagttaaacctctttcctttataaattatcagtgtcaggcagttatttatagcagtatgaaaaaaagactaataccctgggtatcaaggtctttatggttttcatcaggataccaagttctagcccacagcctgtgagttatagggtggcttggtggcttggtcatgatgacaaaccccatcaattcccaaatatgttgaattaattaattaacacattaattcaacaagtatttatgcagtgccttgtctatgctcagcattctgtgagatactgtctggtaaacaaaatacacctaagacatagtgtcttacctgaaatagaatcctagggaattaggtgggcaggcatacctaatctgtaattgagttggtactaaaatcagtgctggtttctatgttgttgttgttgttgttattgtttggggtttgggcttgggttttgggttttcctgtatatttccacttgagtagtaatgttacagtatgtttgtttatttgtcttgtttgtttttggttttggacttggttgacaaaatcagaatatatatgttatgggtttgcagttttcaatcactttttaaccctgttaactttagtctcaagtaaacaaaaaattactgagacttctataaatctaagcaatgtcaggttcagaaaaagggtggcatttgtggtgtatgccttttcactcccctttgctctagtatctcaggctttcctgtgtcctccaggctgacatttagtcccatggaaacaagacttataaggagcattactctttttcattccattaaaatttaccttaacgttgtgccatttcttccaggagttccctttacatatttctgtcatctaaaaaataaatcagtttctctttaaattaaaccttcctggctcctttgccccattgaatcctggaggaaaacaggaaattaagtatgaaattcaggtattaattaaaataaatgctcatagtgccctattaaattggctgcattttgacaggaacactggttcaagagttacctactctcaactgctgtaatctatatacctccatcatttccaagcatcagtcaagttctgaaacacggacttctaacttcataggcaattgtttaccagcgtttcagtttattactaaacactggaaattataccagacatcttagtcctggatggggcatgcccttctgatcagcaagtctgttcagttataacccaaaacgccatacagtttaaggagaatgaaaacagaggtaccaaaccttttgaggaattgtcttttccacttttagctgtttctatctaaagaactggggctagccccaaaccatcagcgtgccctttcctcatggacagtgtgggagaaatacagaccaatcccttctctttgtggatttcatgcagtcccactcttctaattttatttgtcagtaacatgttccagtttctgagatcacaattaatcttacattaattacattttaaattaaccacaatatgctctttcagcagcacttaaaatgtcatcagcaagacattgcataaatcattgttgagcgtggtttacttgtgaggagatttatgtagatgataattccttaaaaggcacatggattttttaaaactcttatcaaagtatgatatttctggggttcgaccacagttacaggaaggtcatagtgtatccggcagtttgcacagcccttcacctaattttgccaacaagcatatgaagggaaatatattttcttctgtgattatccattttgtgttttgtcagtttcaatgacttctcttccagatttatgaagtttatatggcactgttatgagagacctattccaactctgccttttagtacctccagacccctaatgacacaattatgagctttctcaagtaatgttattgcttaaacctttaaagtctcccaaagctcggagcactatttgcaaatatgtagtaaattaaactgcaacacctgctactgtgtagttgtgtcacaggtcatttcatctctctgggtatcagtttcctcaaatgtcaaaataaagggaagctagaatcactgtaagatcttctgcaagtctaaaattctggtattctctgaacaatgctatagatagttgactttcactttcctcatatcacactgactgattgatgttgattcttatctcaaaaagtaagatttctagctctagagagaccttcaagattgtcagctctaacacctccattttgcagataaaggaaacttagggcttgagaaatgaagtgacttctcaaactttccacagtcagcaagtggctggcactaaatgccaactctcctgctactgataaagttctctctcctctactccatgaaaaaaaaaattcttgcatttttatttaagttgaagatatttcaaagtaaacctgatcaatgaaattcaactgtgaacacgtatgtcagaatattacagtcaggaaacaggaaagggggatgaaaaatggcatgtgtagtaggacccagacagccaaattaatattgattcaaagaaccagaactgcaatgaaataaggacagaactaaagaaattcagaggtttggggaaaagaaaaaatttaataaaaatggaaataagactcagacaagcacagctatgcttttgtcattgacattcagtactattaagttcatcttcatcgggacattggtaaggaaaggcgtgtgatctctttgcagactgatagactttttggccctgtaatgatagactttgtctttttttttttagaactctagttgcaaaactctgcttatacgtgaaaaaaagatcagtctgcatctgtccctgttgctaatagtaaccatctttcaaatattgccagcttttcatatcacaagcattttggtccaactcacttcacctcattcagtcttcgctactcaggacttccttttaattgacacacaataattatacatatttatggggtacaatgtgatgtttcagtacacatatgcattgcctaacgatcaagtcagggtatttagcaaacccgtgacctcaaatatttattatttctttgtggtaaacacttttagaatcctctcttttaggaattctttgtatagtttcaaggcttctgccacctccacagaatgctttttggttctctctgtgatctgcacagtgtattttttctcatttcatctactgcttgtcctacactttcatttcttcatagcactcctgatgtatttcaaaatctttaaaagcattactggtaatcatcataataataataatgaggctataacattttccataccacagtcttagaaatcatctagtttattacgttcaaaaaatttcccaaaagaaggcctaccaaacatgtaataaacctaaaaatgtatcaggcactagttcagaggctgcatacaccaatctgatgctcataaactcattctagctatttgtacaatacaggctttcttctccaaggtttccatagagtcctagaggaattattagaatcctgagccggaattaaatgaaatgagtgttaaactgtgatctggtaaattgaggtagatggtgcaaacagctgattgttaaaggaaagtatcctcaagcctcacagttgcagggtctgttttataatctcatatcctagttttgcctatttggccattgaaaaccaatccaaacagcctctttaagtgacagctagattcaattcctgttgaggtgttgttgtttaaaccctctctccagagagcttcagtgggattgaaaaatacttgttccctggaagctacagtaggaatgctctatgatttgtgcataatacatatgataatctgagctttaaattaatccctaacccttctggataatacgctgcaggtaatttctccttcctatattacactgcggaagctagaattcagaagtatagtcttgctcaccttttaaggataatagagcttcaaaacagtattgcaggaagcaaagtggaataaacagaaaactgtcaaactagatgccactactgtgagttgttgaaaaggttaaatgtcagaagcaaatataattggatgactggaatgaatgactaagtgctttttacactaagttgcttgtttcacaagcaaccctagacccttagaaacagggttgatgaagtcaaagggacggccattctgtcttgtctttccccttctcagatcagcagaaaagcagcagaaaaacatggtgttggattgtagtccctacagatttggtacttccaagactctcccactccagcaaaaagaaaggacactcataacctttcctttttttctactccatggtaaaaatctagagatgggtatagtgcaaaatattcagattttggagaattattatccattttgtacttaaaaaaaagaaatcttttgagaatttaaacccattgtttaataggatctcaaataaagcaattgcactaaaattcaagccaaagaagccattaagaactgatcatttatttggaggaattaatgttattttcctttaaggaaacaaagataagaagcatagatgttttaaatgcagttcttaaaacaatcttttcttcttaatgcttcagaaattgtttatgatcaaaagatgcttctgcgtttttatattaaagccctgccttgggcagggagcaaggagaatatatcattattagtgggaagctcgcaagaaagatgagtgtcccccactctctctcctcctctctggagtccaactgcagctgtaactttggctctgaaatttgaacaagggaggaagaaggctggatctggtgtcaactgtgaacgtgatttcccccaaggcaagagccaccccaaacagggcatgtactttaaattgcttttcgggtaaaggtccgaggtttccattgaaccagtagcctaaagttgtgaacccaacacgagacttcctgtattcccactctgcttctaccacaaaccagttttaggagcttgaaaagatcacagagctgctataggcctcttttctcccctctgtcaagtgaggaactaggaggaggtggcttttagtctttttcagtttctgactgtgtgaaagctatattcttcctgactggtgaaagctttgtatattatccctcacaagggatgttttctttttaacaagaaaacaacaggagataggtaatatcagcaaatactgcatgatttctcgtataaaaaggcatctaaaataatcaacagtatggcgatagagaatagaatggtggaagggcatggaatcagggggataacgagagctgttactcaataaatataaatttattcaagatgaataagttccagagatctcctgtacaacgtgatacctatagtgaacagtaaagtattatatacttaaaaatttattgagagagatcttgtgttaagtatccttgtcacacacacacacaaagaggacacaagaagacttttggcggtgtggatacgtttattacccaggttgtggggatgataatgtaactgaacccaggactggccacttgctacttaaaagccagacatgacagacgagggttggtaggaggaaaatgaggtttatccatagagccagtacaccgcaaagagggtggactatagcctcaaagaccatcttaagtcagcacaggtgttaggctgtctttatgttaagggcagggggaagagaaggggaatctagatcaagagctgaccaataactgcagacatctgggcagcagcaagggtccgagaaggttgagaacgtctttgtcctgggtcaggtcacaatgctcctataaatccttaacaaaacagagttgtttacatacttccccctttaatcccagatttagttgtaaatctgatttacaactaaatacatgatttaatgtaacatcacatacatttctgttacattaggattagagacaagttctatttagaaataacttcaacagtttttatattttattttcacattgaaaatcggtcagacttgcttcagcctcaaagagcatgtttatattataattaaatgagcactggtggtgagctgtagtttctgtttctaaatgggaaatgggttaaaccaaaatgaagttaattatattagtttttttgctgtttcactgttacagtaatgctagtgtgtagacatacatatgcgtatatgtatatgtgtgtatatatatatatatgtccaacctcaacaaaattgtatacattaattatgtgcagtttttagtataccaattagacctcaataaagctggaaaaatgacaaaagaagacagatagcatcctgagtgcctccccaacctacctgaaccccagtagattggtgtgtaggtaggaactggacctttcatctctgtcttcccaatgtccagtacactgggcacttagtaggtattacataaatgtgtgttactggtcggtttaaatcaacaacctgatacctttctgagagtagaatatgagacctagtttaggtaccaggtaaagagattctaacctgctttctctacgtaagactaacctcaccctggccatgttaattccaatccttaatcttttaatctaatgagttaactatcagttgtataatttttatctgattattccaattcatcacatttaattatcttactgtttctgccttccattagtgaggaggagaaaacatttgctaataattttattatgtagtagggactgtagtaagtactttatatatcccatcatattttatttaacagcattctcaaaaacactgaggtagaaattatgacacttattttacaggtgaggaagcagctcgtagcattttagtaacatgtccagattctcatcactaagcagcatcatagctaggactggaaacaagcctgtttccaaagcctgctttttttttttttttcctgcgctcactgcactggagttttcttcccctaccaaataaatcaacattatttctgagattgcataatgggagtatgagggacttggataggaagcagagaactgtctgaaatgacattttctaatattggtggtagattgcattgatccagtgagatgaacatctccatctcactagccacccctatggtcatcaatgtgcatcttgttatgtattttggtgcacctagtggtacaaatgagaccacaaatcttattcttgtgtaaagcatcagattgttttgggctcgccatccatgtcttttgcctcattagagccatattctactcaatccagtgagaaaattgccatagacgacttttcagataacaatgatgaatactactttatatatgtatacacacacaatgtgtgtgtgtgtgtgtgtgtgtgatcaattctttcagcttagtaaaacaaaagtgttagcagaatttttacattcaagttttctgacagtcataatggtaaataaataactctaattctgtttctcaggtgaagcgaagttcggaagttgtcaggctactgaccactctgatggaactagcaaggaaatgtgtgtcatatattattttggaaaaagaggatttttaaactgaattcttaaagttgtgaagagaaaaactgaaacctattttctcctcttggttaccagtgtccatttagcgcccagaaatatcaaatggggatcagagtagccctaaaatgatgccataacacaccttgcaagtttctttcattgtgaaatttgtgagtctgataatacatcttttttcatgtttctagttagcccctttattgcatgattaataaaagcaaagggatgaaggactggggaactcagtgggcaatgtatgcgataataatatctaatcaatttccttctgcaagtttgattacattaagacttctggagaagaaaattgattggactcattcacttgggaacctttcaggaaacaaagtgatttcttttagttttctattgcaactgatattatgggcctagagccaaggaaaaatgaattgtcctatcctaatcaattacttaaatctggtttttataccaagtgttcataaaattggcaaagcattgaatgggtggaaaaatgctaaacaggaaatagaaaaagaacaaatcaaatttaagtaaacaaggatgaaaggaaaattatatgtataatatatattatgtataatgtatataatatataaatatatatttatatattttttgagacagggtcttgccctattgctaggactacagatacacactaccatatctggcttattttgttcattttttgtagagatgaggtctcactatgttgtacaggctgatcttgaactccagagctcaagtgatcctcctgcctcagcctcccaaagtgctgggatgacagttgtaagccactgcacccgggaggaagaatgcgtattaaaggaagtaatttagccttatctcacctcaggtgtccagacatttattgagcacctactatgtgtccggcctttaactagatgttagaagtctaaaggtgaataaatcatcatatctctaactttaagggcctcccgctctaataagaaaacatgcacacacacgcacacacacacgcacacacacacacacacacagagttgtgaaactactagatggatcaatggcaaagatgaggatagggaacaattatagcacaagaaaaggctcctaattcatagaattaggtaaaaaggtatttgctttgaggcaaaaaaaatacatcagagtgtacaaaaaagaaaaagaaaaactgtgtggaccacaggattttgtaattgctgagcatgctgtgtgagacatggaagcttacaacatgaggagcagtgagggtaatagagaagatggattgtagaaaatcataggtgctgctctttgtgaagcaggttgtacttcaggcagtagaaaaccactgaatgtttttaaatggtggacaatatggtcagatttaggtgttgaagggatgattctggcaccattatagaacatgacttttactaggaaaagatgagagaaaaaagaccagtgaggatatagagattttccttgtatgctgcaaatggaattcctctttcaattttattttgaaggatctccactggatttaagtagtcaatgaattaaaaaataagggagtgaataagaaaggaggaattatagctatagccaacaattaatatctatggctatgaagatggaagttgacttcattgagcaaacaggaacacacttttagtatttaggctaatgagttagcacatctgatcatttatcttcaatctgtccacagaagatcttttgaggtaaaggatttccaaagaagtgggcttatgtcaaatgttccaagatcttgaacaattacggtcctttcagaagggcagataaaatccaatcacaggcataattgttttattgggttttgctttattgagcttcgcagatactgcacttttcacaaattgaaggtttgtgacaaccctgttttaagccaaccctattggcgccattttcttgcagcatttgctcacttcatacctcagtgtcacattttgataattctcccaacaattcaaaatttctcattattattatatctgttatggtgatttgtgatcagtgacctttgataatactattataattgttttggggaaccatgaactctgcccgtacaagacaatgaatttaatcaataaatgttctgtgtgttctaactgctccaccgaccagccattaccccatctctccctctcctcaagaccccctattcccaaagacacaatactgaacttaggccagttaatgacagtacagcggcctctaagtgttcaagtgaaaaaaagagtcacacatctgtcactttaaatcaaaagctagaaatcattaagcttagtgaagaaggcatgtcaaaagcaaagataggcccaaaactatatctcttataccaaacagccaaggtgtgaatgcaaagaaaaagttcttaaggacattgaaagtgctactccagtgaaaacatgaacgatagaaaagtgaaacagctttattgctgatatggagaaagttttgatggtctgcatagaaccaaccacaacattcccttaagccacagcctattccagagcaaggccctaactctcttcaactctgtgaaggctcagagaagtgagaaagctgcagaagaaaaatttgaagctagcagagttggttcatgagatttaaggaaagaagccttctctataacgtgaaagtgcaaggtgaaacagcaaatgctgatgtagaagctgcaacaagttatctagaaggtctagctaacgtaattgatgaaggcagctatactaaacaacagagtttcaatctagatgaaacatctttctattggaagaagatgccatctaggacttctatagctagaaagaaaaagtggatgtctggcttcaggacttcaaaggacagaccttgttaggttacttgaagttgaagccaatattcacttactgttctgaaaatcctgagactcttaagagttctactatctctactctgcctgtcccctagaaatggaataacaaagcccggaagacagcacatctgtttatgcatggcttactaaatattttaagcccactattgagacatacatagaaaaaaaaaagatttctttcaaactgttagtgttcattgaccttgcacctcatcacccaagagctctgatggagatatacaagaagattaatgttgttttcatgcatgctaacacaacgtctattctgaagcctgtgaatcaaggagtaatcctgactttcaaatcttattatttaagaaatacaattcatagggctagagctgccaaacagagtgatttctctagtaggtctgggcaaaataaattttgaaactactggaaaggacccaccattttagatgtcattaagagcatttgtgattaatgagagggagtcaaaaggttaacattaacaggagtttagaagaagttgattccaacccttatggatgacttcgaggggttcaagactccagtggtggaagtaactgcagatgtggtagaaataacaggagaagtagaattaaattttgagcctgaaggtgtgactgaattgctgtaatttcatgataaaactttaatggatgagatgttgcttcttccagatgagcaaagaaattggtttctttttttttattattatactttaagttctagtgtacatgtgcacagtgagcaggtttgttacatatgtatacatgtgccatgttggtgtgctgcacccgttaactggtcatttacattaggtatatctcctaatgctatccctcccccccccaccacccccatgacaggccccagtgtgtgatgttccccttcctgtgtccaagtgttctcattgttcaattcccacctataaatgagaatatgtggtgtttggttttctgtcattgcgatagtttgctcagaatgatggtttgcagcttcatccatgtccctacaaaggacatgaactcatcctttttatggctgcatagtattccatggtgtatatgtgccacattttcttaatccagtctatcattgttggacatttgggttggttccaagtctttgctattgtgaatagtgccacaataaacatacatgtgcatgtgtctttatagcagcatgatttataatcctttgggtatatacccagtaatgggatggctgggtcaaatggtatttctagttctagatccctgaggaatcgccacactgacttccacaatggttgaaccagtttacagtcccaccaacagtgtaaaagtgttcctatttctccacatcttctccagcacctgctgtttcctgactttttaatgaccaccattctaactggtgtgagatggtatctcattgtggttttgatttgcatttctctgatggccagtgatgatgagcattttttcatcatcttggctgcataaatgtcttcttttgagaagtgtctgttcatatccttcgcccacttgttgatggggttgtttgttgttttcttgtaaatttgtttgagttctttgtagattctggatattaaccctttgtcagatgagtggattgcaaaaattttctcccattgtgtaggttgccagttcactctgatggtagtttcttttttgtgcagaagctctttagtttaattagatcccatttgtcaattttggctttgttgccattgcttttggtgttttagacatgaagtccttgcccatgcctatgtcctgaatggtattgcctaggttttcttctaaggcttttatggttttaggtctaacatttaagtctttaatccatcttgaattcatttttgtataaggtgtaaggaagggatccagtttcagctttctacatatggctagtcagttttgttaaatagggaatcctttccccatttcttgtttttgtcaggtttgtcaaagatcagatagttgtagatgtgtggtattatttctgaggactctgttttgttcccttggtctatatctctgttttggtaccagtaccatgctgttttggttactgtagccttgtagtatagtttgaagtcaggtagcatgatgcctccagctttgttcttttggcttaggattgacttgccaatgtgggctctttttggttccatatgaactttaaagtagttttttccaattctgtgaagaaagtcattggttgcttgatggggatggcattgaatctataaattaccttgggcaatatggccattttcatgatattgattcttcctacccatgagcatggaatgttcttccatttgtttgtatcctcttttatttcattgaacaatggtttgtagttctccttgaagaggtccttcacatcctttgtaagttggattcctaggtattttattctctttgaagcaattgtgaatgggaatttacttgtgatttggctctctgtctgttattggtgtataagaatgcttgtgatttttgcacattgattttgtatcctgagactttgctgaaattgcttatcagcttaaggagattttgggctgagacgatggggttttctagatatacaatcatttcatctgcaaacaaggacaatttgacttcctcttttcctaattgaatgccctttatttctttctcctgcctgactgccctggccagaacttccaacactatgttcaatagtagtggtgagagagggcatcctggtcttgtgcctgttttcgaagggaatgcttccagtttttgcccattcagtatgatattggctgtgggtttgtcataaatagcctttattattttgagatacatcccatcaatacctaatttattgagagtttttagcatgaagggctattgaattttgtcaaaggccttttctgcatctattgagataatcatgtggtttttgtcgttggttctgtttatatgctggattacatttattgatttgcatatgttgaaccagccttgcatcccagggatgaagcccacttgatcatggtggataagctttttgatgtgctgctggagtcaatttgccagtattttattggggatttttgcatcaatgttcatcagggatattggtctaaaattctctttttttgttgtgtctctgccaggcttcggtatcaggatgatgctggcctcataaaatgagttagggaggattccctctttttctattgattggaatagtttcagaaggaatggtaccaactcctccttgtacctctggtagaatttggctgtgaatctgtctggtcctgcacattttttggttggtaagctattaattattgcctcactttcagaacctgttattggtctattcagagattcaacttcttcctggtttagtcttggaagggtgtatgtgtccaggaatttatccatgtcttctggattttctagtttgtttgcatagaggtgtttatagtattctctgatggtagtttgtatttctgtgggatcagtggtgatatcccctttatcattttttattgtgtctatttgattcttctctcttttcttctttattagtcttgctagcggtctatcaatattgttgatcttttcaaaaaaccagctcctggattcattgatttttttttttgaagggttttttgtgtctttgtctcttccagttctgctctgatcttagttattttttgccttctgctagcttttgaatgtgtttgctcttgcttctctagttcttttaattgtgatgttagggtgtcaattttagatctttcctgctttctcttgtgggcatttagtgctataaatttccctctacacactgatttaaatgtgtcccagagattctgatatgttgtgtcttcattctcattggtttcaaagaacatctttatttctgtcttcattttattatgtacttagtagtcattcaggagcaggtcgttcagtttccatgtagttgagtggttttgagtgagtttcttaatcctgagttctagtttgattgcactgtggtctgagagacagtttattataatttctgttcttttacatttgctgaggggtgctttacttccaactatgtggtcaattttggagtaagtgcagtgtggtgctgagaagaatgtatattctgttgatttggggtggagagttctgtagatgtctattaggtccacttggtgcagagccgagttcaattcctggatatccttgataactttctgtcttgttgatctgtctaatgttgacagtggcgtgttgaagtctcccattattattgtgtgggagtctaagtctctttgtaggtgtcgaaagacttgctttatcaatctgggtgctcctgtattgggtgcatatatatttaagatagttagttcttcttgttgaattgatccctttaccattatgtaatggccttctttgtctcttttgatctttgttggtttaaagtttgttttatcagagactaggattgcaacccctgcctttttttgttttccatttgcctggtagatcttcccccatccctttattttgagcctatgtgtgtctctgcacatgagatgggtttcctgaatacagcacactgatgggtcttgactctttatccaatttgccagtctgtgtcttttaattggagcattagcccatttacatttaaggtttatattgttatgtgtgaacttgatcctgtcattatgatattagctggttattttgctcgttagttgatgcagtttcttcctagccttgatggtctttacaatttggcatgttttttcagtggctgttactggttgttcctttccatgtttagtgcttccttcaggagctcttttagggcaggcctggtggtgacaaaatctctcagcatttgcttgtctataaagtattttatttctccttcacttatgaagcttagtttgtctggatgtgaaattctgggttgaaaattcttttctttaagaatgttgaatattggcccccactctcttctggcttgtagagtttctgccaagagatcagctgttagtctgatgggcttccctttgtgggtaacccgacctttctctctggctgcccttaacatttttttcttcatttcaactttggtgaatctgacaattatgtgtcttggagttgctcttcttgaggagtatctttgtgatgttctctgtatttcctgaatttgaatgttgacctgctttgctagattggggaagttctcctgaataatattctgcagagtgttttccaacttggttccattcttcccgtcactttcaggtacaccaatcagacgtagatttggtcttttcacatagtgccatatttcttggaggctttgttcgtttctttttattcttttttctctaaacttctcttcttgcttcatttcattcatttgatcttcagtcactgataccctttcttccagttgattgaatcggctactgaagcttgtgcattcgtcacgtagttctcgtgctatggttttcagctccatcaggtcctttaaggacttctctgcattggttattctagttagccgtttgtcaaatctttgttcaagatttttaacttctttgccatgggttcgaacttcttcctttagctcagacaagtttgatcatctgaagccttcttctctcaactcatcaaagtcattctctgtccagctttgttgaattgctggtgaggagctgcattcctttggaggtggagaggcgctctgatttcatagaattttcagtttttctgctctgttttttccccatctttgtggttttatctacctttggtgtttgatgatggtgacgtacaggtggggttttggtgttgatgtcctttctgtttattagatttccttctaacagccaggaccctcagctgcaggtctgttggagtttgctggaggtccactccagaccctgtttgcctgggtatcagcagcagaggctgcagaacagtgaatattggtgaacagcaaatgttgctgcctgatcgttcctctggaagtttcatctcagaggggtacccggccgggtgaggtgtcagtctgcccctactggggggtgcctcccagtttggctactcctgggtcagggacccacttgaggcagtctgtccgttcgcagatctcaagctccgtgctgggagaaccactactcttccaagctgtcagacagggacatttaagtctgcagaggtttctgctgccttttgttcggctatgccctgcccccagaggtggagtctacagaggcaggcaggccttcttgagctgcagtgggctccacccagtttgagtttcccggccactttgtttacctactcaagcctcagcaatggcgggcacccctcccccagcctcgctgctgccttgcggtttgatctcagacacgctgtgctagcaatgagcgaggctctgtgggcataggaccctctgagccaggtgcgggatgtaatctcctagtgtgccatttgctaagaccattggaaaagtacaatattagggtgggagtgacccgattttccaggtgccatttgtcgccccttcccttggctagaaagggaattccctgaccccttgcacttcccgggtgaggcgatgccttgccctgcttcggctcatgctcggtgccctgcacccactgtcctgcacccactgtccaacaatccccagtgagatgaacccagtacctcagttggaaatgcagacatcacccgtcttttgtgtcacttacgctgggagctgtagactggagctgttcctattcagccatcttggaatcgccccccgaaattggtttcttgagatggaaactactcatgctgaagatgctgtgaacattgttgaaatggtaacaacggattaagaatattacataaacttaattaataaagcaacaacgggatttgagaggactgactccaattttgaaagaagttctactctgagtaaaatgctttcaaacagcatcacacattacagaaaaatatttcatgaaaggaagtcaattgatgtggcaaacatcattgttgccttattttaagacactgccatggccaccccagctttcaacaacaactgccctcatcaattggaagtcatcaaaatagaggcaagacccttcactaggaaaatgtttccaactttttgaaggctcaaataatcattggcatttttttagcaatgaagcattttttaaattaaggtatgtacattttcttggtcataatgcttttgcacactaactagacacagtataatgtaaacataactttttttttttatttttttttttaggtggagtcttgctctgttgcccaaactggagtgcagtggtgcaatcttgggtcactgcaacttctgcctcctgggttcaggtgattctcctgccttagcctcctgagtagctgggattacaggcatgtgccaccgtgcacagctaatttttgtatttttagtacagacagggtttcgccatgatggccaggctggtcttgaactcctgacctcaactggtccatctgccttggcctcccaaagtgctggaattacaggtgtgagccactgcgcccgggcaaaacaaaacttttatatatactaggaaaccaaaaaattcctgtgactgttttgtagtattcactttattctggcagtcttgaaccaagtgtacgatatctccaagatatgcctgtacctgtcagagttctactttgcattcaattacagctattaatctcctgcaagtcattttgtctctctgaagttttttttttttttttcttaaataggagaatactatttatcaactcatttcatgggattattgtgatagtgaaataagaaactgtaagagaaaaccttatacttttacaaatctaattgcttttattatcattattgtgtatgtgtgtgtttgtgtgtgttcactgttaatctcaatgcccttcttactatttttctcccccttaaagcaaccttgttcattctcactttcccttcaggtatcagttttctaataccttcccctcatcaaagtctaagtagaaaaataagatataagctattgacatgttgaataaaaacagtgagtttctactgctaggaattccatatcttgtcttggccctatcagccttgaaactaaaataggaattttcagggttcttatggaaaggtgagtctaatggtttgaggcacacacacatatacccccattatatgatttatttcagagaaaatcatcctagatacagtcccaatacagtcagaagccttgagaagctgaaaattggaaggaaaatgtggatagtgtgtgttcctatgagaatttccatttcatcatacagtaaaagtctatgctggctctcatacatttctataataaaatgtatcatcaatatcatcaatgaaatatatatatgtatttcatgtatttatatatttcatatatatataaatgctgaattaaatataaaacttaagtatattacatatctattgaatactgatttcagcatttttggatttgaggcctgctgggagcactgtgttgactcaatctaccacattgcccaaggctggccatccttcacatagtcttacagctttctctgcccacaactccaggtgtctgtgtagctttgactggcatctctgcagagctgagggggctgtgggaatgctgtctttctccaggcatccacagaggggctggcttcaggtttagtttagtcccatagtccacttgtgggtcagagaaatacattaattaggttagctcctatgtgagttattgcttcgcaggttaaaatcattctgattctactttggtaatatgcaaggattttcaaaacattttctaagagtgtgatatgtgcagcaagcatttaaatttagatatcaaattgtttttattgaatttcaaactcaaaagtgtttctaaatattgtcattttggaattgggcccccaaaaatagtaaaaatagatgtttaggtagagaaacacatttgtgtagcaatgcctcaccctgctacagctcgttcgctgacactgcccaacaaacccactgaggcttggtgcgagaaattacctcattaaataatcttataaaaaaattgtcagatgtaacaaagactggactctctgagcttttctctataaagaatgcattgttaagttgatcgggttaaggttcagttagtccaaggtagggtttatgaataggaagaaacttgtcattcactttgtagatgagtaaagcatgtgaatttaggggaaaatatcatcagtcacttcctcaaattgtttttggaagtagcaaaatgtcaaccatattattaaataaggaaaccatacttcttaaataaacttccctagaagcagatctagagatgaggatttgatttgtgtgcaaggaatttatgaaagggagtgtgctaaggaaacaatggaagcaggacagggaaggagtcgaaggggagcaagagggagggcccaggcagaagtcctcaagctcagggcgtagatctcagccagtccctcaggtgtcctcaggagtgtcagagttttcccaactggaggagaaaaagctagactgccattttcccacccccaatggtcattggttaccagcatgtgtggaagatggcagtcctcaggcacttctggctcctggaggctctggaaggcaaagagaagtctgccaaagaatatcacagatgatggccattggaagctttccaagggttcaggttttcagaactgtttagaagagatgggaagagatttgggtcattacagcactggccgcagcactgtctgctatgtaagtgcatgactagatggaccttgagctattcttcaggtccagataagggatctatgtgtcattttaaacactggcttcatgtacttgcctgaccacaaagggcaatgtcaccaggaatataaagtcaaataaaatgggtcctgtaaaagacaatttgctgctgggttgcagtttaatccatgacctcttttgcttacatgagatcttgaaagaatattaaattaagagttatcttctatgctggcataagaagcaaataattttccataatatggaaataaaatatgtgaaaaatgttaagtttcttgaaacaagagtttaaccagaagttaataaacaactctttcttcaggaaacctttgactcatggtttatacatacttttgtattaagttgtgtagcataaaaataaaagtatagcagtagtatactaccactggagtgtcattcctgagatagccagatgttcagttattttgaaataaccctggagtataacagtaaagctaccccctcaaaaaagttttttgttattagaattcatgatattaatctaagttaatctctccattcctttgtgctcctcataacatgttgtttaaatgtctctacagtactgattccatcctattttatgttattattatcttgatggctgtattagtccattctcatgctgctgataaagacgtaccagagactgggcaatttacaaaggaaagatatttattggacttacaatttcacgtggctggggaggcctcacaatcatggtggaaggcaaggaggagcaagtcacatcttacatggatggtgcaggcaaagagaggagagcttatgcagggaaactcccctttataaacccatcagatctcgtgagacttattcactatcacaaaaatagcccaggaaaggcctgcccccctgattcaattaccttccactgggtccctctcacaacacatgggaattcaaggtgagatttggttagggacacagccaaaccatatcaatggcaaaaccgtataaggttcatctttagatcatccaaaacatttgtcactgttccagctcatgatagatgtttgaaaacatttgaatgcatgaattggcctacaatttcccttctttgaaacatcttgtcttttattataatagccaagtacatttgctctttgaataatgattcaccatacactctcctagctgcttgttaattcttaactttctctcccttgttcctttggaatctgttatcagtgtttcgacaggatgtgcacaagtgtcagagcatatgttgtctgcatatgtaccaaagaaggcatatctttctttccttttctctgcaatattcttctctttaatgcaactataaattcccagaacatacctcctattttgagccaagaatcaggctttgaataaggtttcgctcatgtagagtaggattctggatattcagcttcaatagtgaagctaagaattctacgtatcttttcctactagcttggaaaatatatcttaaactagtccttggctatgactttgccccttctcaggaatagacacagtgtgtttatgcaaaacaaacacagcgttttcaaagatagagcaagagaaaaaagagacttctctaataggctttaatacaagaatgaatttcatggatttatttcagagcaaatcatcctcgatgtggtcccaatacagtcagaagcctcgagaaactgaaaattgggaggacaatgtggacagtgtgtgctcctatgagaatttcagtttcatcacacagtaaaagtctatgctggctgtcataattttttataataaaatttatcatcaaaaatactaacaaaatgttgcaaacccaacacattcacagtcttctatagttttaaacatacactaaggtcaaagccaataggatagtcagctgctttaatttaggagtaacacgagaatgggccagcccctagtagctcctccattacctggtcatatgcgatgtccactatgattgcatcgtagttacactcctgggaaaacacacctgtatccgaaatctcccaaatagcaaatggtagctggaatagggaaataggtggctatcactgagtggaattaagatccctaagtaagtgaattgtagagaagctcatctttgatcagggtcataaaaaatctggtgctggaaggcagggattaggtgaggctgtaaaaccggatgccccaaagcaaatttgctttgtctttctttctcctcacagactcattccttatcttcccaattaatgctatcactgttctcccctggtaccaaagcttaagacctatgggttgtttggacgcctaactcttaccctgcttgtccagtcacgctctggtaattgcgtttctgctttattccggttgccttgatttaggatttcatcttctcccacttagttgagtgccattttctccttcctgacctctcatattttttgtgactttttttttccatctgagcagctagactgacctctcgtgtgttttaacgtcagtcctctcttccactgccagccatctcttcagtcccaggtttatctccatccctatctcctcccccagctccgtggcttctccccactgtctcctcctgtctttgccatggtgatggctactgtggagtggagtgttggttaggggccctggagccccacccttctagtttcgaaacccacctctgccttattacctgtgtgaccttgggcaagttatgtaatctctccaactgtcattctccttatttgaaaaattatactaattaatgcctaactcaaaagattattttgaatattaaatgagataatgcccataaagagtttagcacagggcgtgttatacagtgaagtattcacaattaccattgaagaaatttgatgattagcatttgatatcactgaggctaggagatgcagcaagaacttcagtgggtaaatttctaggcagacaaacaatattactaaaatagaaggtatatgagccatctgcccctttttacaaggtatatgagccatctgcccctttttacaaactacagaacatttaaaattaattcaataagcagaattcctggtattattattaaatatcaacttttcaattgacctggccataaaccatctgttggttgataaagacacacatcctaaacttacagaaatagtaccattattcaactttatatgccagtggttcatttctttaacaaatatgtagcgctctccttcatgctatgctagactgaactaattgttcaggacgtcagaggacaagtttagttcttgctctgagaaaacatcatctgtatgagtttgcaagggtttccataataaaataacaaagattggatggcataagcaacagaaatttattttctcacagttttagaggctagaagcccaagatcaaagtaccctcagggttgttttctggtgagggctctcttcctggcttgctgacggctgccttcttgttgtatcctcatatggcctttcctctgtgcacacctgctagacagagctctctttctcttctaaggacaccaatactatcctatcagggagcatgccccaccctccaacctcatttaactgtaattgcctccttaaaggcccatctccaaatacagacctccaaattggggagtagggctttaacgtgtgaattttgggggacataatcctgttcataacactatctaaccaaagaaccagaaaaatagaagatcaagggacacctagttcaagtttttaggtgaaccataacctacataagttaacataaaaacatttctgagagaaaaaaaagaatactatgttggtactctaactcaaagatcttggactgagaatcaggttgtttgtgttctaatcttccttctgcagtgaaattgcagtttaggcaaatcaatttctcaagtcattctgcctctctgtgactgaatcaaatgaagcctaatgatgcttataaagttgttttaagacataaaagagctctacaaggataagatgctgtcattttcatcactggctttcagctaaaagctcagcctgatatatttttaccatttcagggaaggcaatcttcctctccagttcaagtatgtagcataatatcaaagaatattgatgttaaaatgtggacttcatgatcaacatattgattagacactattttgaatatgttaagagagaaagcttcaacctacacatccctgtcaaccatcaaccaaccccaatcataaacatctttagcagaagactgaattctccttttcttgaaattccatagtgtgtgttgctttattccaattacacgatgtcttaacatgaaactgtaatgcgattttcattcagttcttaatttcagatagccagaatatatttctttataaccaatcgagaaatgtgactataatgaagtcagcattacttggtaaaaagatttaaaacaaaatgctctttctctactagtcgaactaaaacttgtctgcatagaggacatctgtaacgtaaaggaggtcaggggcatgcaatgaatcaattcaggagtcttcacaagcgcaatcattcttttctactaaactaaaattgttaagatccttttcattttgaacataatcacttttatagtttccaagtacaggaatctttaaaatctatagctagagatgtgtagataagaataatatattcaatgaacttctttttcatggggtgtaatctgtataattgtttaacacaaggaaaaccacaataaagaaatcatgcccattctctggggaaacagaataaaagcacacagggtcaaatatgcaggttctgtgtgtaaatagcactgatgaagtgcatatcttgcacattttacctttacgtgcttccttctgtgggagaataacaaactccctgcaggtctatagtagtgacaatgattaaaacttgggataaagcagaagaggatctgaaattgttagaaaaactctctgatccccaatctgtttgctctactgattgaaagataccagatttaccaacagctgaaactgatgctgggcttgaacacaggggagaatcaagcagcaaaactcagctttttctttcttgtgccccttctagtagagacagtccataaatatttactgaaggaacgaatgaatcacacagacggagcacagttgggcaagccagtctcacacgtcttccgctgggacgaggacgaaatatttataagtcgtgatcaataaaatcttccctacctgctacctttctcccttctaccccatcacgacacaaaaacctgctcccagttcctctgcttgtaccacctacaaggttttcctagttatcccatgctacttccctggggaagctttcttggccaccaaaggaaagaataaggcaggagttctcattgacaccaatgggaccaattgttttctcccatcactgctgtggttaccaccccaaccctgactgctgccttaaaatacacgcattttggtaagggtgagagaactccgttctacaaactgcttatagaccagacacatgaaatgtgcacagttttaccacactctctgagaataacataatatgccatgaagatcttcaaagcccacactattttattttccttctagttaatgatgccttgggctttagggccacagatctctcttttattttgctagttcagtttagtttccacctcaggccctagctgagatataaaggtatgcaagtagagctgtggagaaattgtgctgtgtgttctacaagaaagggtcacatttggcttttggttgcaaatatcctatttacttccaactgaaactcaataatacagcattctgttaattctatccacatgaactcaccgaccgcctcttatctatgtcagaaatacaaagtcctcctcagttcctctgaaactaattttttcatctcgattagcacatctaggagtcttcctccttcaatcatgtcctcctttgtgtcttggttttgatgatttttctcatcagtcctttccttccactctcaatcacatcagactggcatctcttcatctttcttctttctttttgtgtttgaaaccacaagtgtttttaggattccaagttgattgaactctactccatacatactccaaaattttcttaccaaattgtatttctattctttttttatggctgagtaatattctcttgcatatatacactacatttttgttatccattcatccattgatggacacttaggttacttccatatctttgctattgtgaacagtgctgcaataaacatgggagtacagatatctcttcaatatactgatttcttttcttttgcatgtatacccagcagtgagattgctggatcctatgatagttctagttttagttttttgagaaacttccattctattttccataatggctgtactactttccattcccactaacactgtttgatcgtttccccttgcccatatccccatcagtatttgtccccatacaaatttatttcttgtgtgattgacaacttaattacaatattatgacccttttctaatcagtctgggacaacttaaagtctgcagtggctttaaggagatttccttgagagcaattaattactgtgttgagccatcctgcccattttgagatgaagcttatcttgcactgtgtgaccctggccttgccagtgcattcctaaaatggaagaacagcaagtgaggcgtcagcagtcaatcacccgcctagcatgctcccatgctgaatgcttttccttttaagaaccataatcagatctaatgatttgcaagatagaaaagaacactctcatttatcttgcagagtgcatcaaggtatgtgggaaggatggagatataaatgcaaatgaccttgacaacaagctaagaaaaactagtcagaactttgaactcaatgatgtttaagaaagattcatgggttaagttgtacattagaagttttttgaagtaaagatatacaaaatagagtcttaagtcactccaaggtcaatggagtgagatacttactgaacatgagttaaaattgtttttttttctgatcatgcacattaagatgtgatgaatgaaaagtgtgctgcatagcatatgagagttgaaaggtaagtccaagacaccccctttgattggaccctttattggtacacttaatgataagtgacagaaccgcaactcaaacttgcttaaagaaaaaggaaattttaggtttcataaaattaagaagtctttagactggcactagtttcaggcacgagtatatccaaggattcacaagatgccattaggagcatgtttttctccctgcacctcaggtctacctgtctttcttgtctttatgctacattcttgtgcaaacatgttaccagcatgcctcccttgaactcagggctcctgaacctaaatttctctacatccaaagggctctgatgggcccatcttgggtcccatgccacttcctggactaaatagtgtgtctacaagatggaatattctgtgtgatggcaggcaggctcacctgatgagaagttctactagaattagggggaatagggaaaggtgctaggcagactgaaacaaaaaggaaggggaccagaggaaacatttcctacagatctgcatgtagggatctgaacaagacataagtcatctacgtggtttataggactgacaatgagtgagaattaagtggaaccttttaggttctgagatctctgtcaacgattggacaaagatgaaatatgaagtaggtttttagtttttgcataaaacaaatgcaattggttatacaatatttggggggaaagaatgataaaagtcaaaagaataaaataaaaatatgtaatctaaccaccataaatgtgtttggcaaatttttcttgcattgtatacaaatatgtgtttatgaatcagaattattcagtatctatactgtatttttgtttaaaatattgagaacattttggcatatgattaaagcagtctacaaaagttacaaaagttttaatggctaaataacagctcatctaatggatgtgtcgtagtccataatcaatgtctgttttacatatttaagtttcccattttttactttcataggtaatattaaaataaatattttgacagcacatctcgtcattttctgaaaattgaatccaactagttaaattactgagtcatagatatgaacatataaaagattttggtgtgtgttgtagcatttctatccataatattactatttttaccagcaatatgtggaacgatccttactgtttcccaaaaatgatgatttttcagctattatattgtgagatatatgaagcaagcattcttgtttcccccacaatatctactcttaaaatcacctagtaaacatttattaaattttaaagaatgggccatagcaagtatatgtttttaattctgcattacaaagccaaaagagagagtctgtgttaatgaagtaaatctctgcttattttaatatcagtaacactcattgttgaggatgtagagaaatgactcttctataaaagcatagtatttcatctggcaattgaagagatgtacatcttaaccccaaaattatttatttggaattatatccaaggagatgtttgatcaaatacacacaaatatatttgatatttatcaatgagatctttatagtatcagaaatcttaaagttatttcattacccatctctatttatttaaaatagatcctagatattcattcagtggatgcaatacagccattataaaggaatgccttgagttaaagttggctgtattgaaatcttgttccaccccagcccaccaaataccagccttgtgcccttgcacaaatatcttgtctgtgactgagttccgtaaaatttattttgagcattaagttggattttacatagaaaaaccttaccaagttctaatgtcaaaatttttataatttttattaaatggaaaaaatgttgatgtgaacaagctatcaaatagcatggctaagaatatcccatttacataaaattatatatgtgtatgtctgcatagagatccagaataacattaatcaaaatatgaattggattatttctcatttggagaacattgggtggtttttgctttcctctttatatttttctctattgcttgaattttctctataagtatttattatctgtatgatcataaaaaagttaataattgcatttactttttaaaaaagtcaaattatgtaagaacttctttagaaaggtctgtacttcataggtgactttcccaaagccatgatgccagattgcttcaggatagcatgagaacaaggtctactaatttttgttcatatatttttgttttactaatttttgttcaagtgcctgctatcagctaaaatgatcctgggcaaaaggaaccagcaatgagcttaggctacaacaattagaaaattccaggctttggctgggtgcggcggctcatgcctgtaatcctggcagtttgggaggccaaggcgggtagatcacgaggtcaggagatccagaccatcctggctaacatggtgaaaccctgtctctactaaaaatacaaaaacatttggctgggcatggtggtgggcgcctgaagtcccagctactcaggaggctgaggcagcagaatggcgtgaacccgagaggcggagcttgcagtgagccgagatcgcaccactgcactccagcccgggggacacagcgagactccgtctcaaaaataaaaaataaaaataataataataaataaaataaattaaaaaaaatttccaggctttgaagaaaaaggctagaagttctgccacaattagctgtgtgaccttgggcaaacctcatgatctcccagatcctgtcttttattttctttttatttccaattataaaataattatctgaaaccttctgtacttttaagaacataaaatgatccgaaaactgatgtatttatttatttagttgctagtaggtggttttaaccaaatctcaaaatactagccttggactaagtatttattcagagataagtggaggaattaggtggttgacgtgaatcttcaaaggatgaatttagttaaaaaaaaaaaaaggaaattagtctttaaaattatagagaatttatgatctggaaagtttgttcaagctcaagatataaatagatttcataaagtttcagataagtatgccataggttactgagattttattgctataactcttaaatttgaatcatgagaggcaatcatcgtcccttaacaccaagatcaagagccagaataaaaggggatgaaatgtgtgcaaacacgagctgtccattttgtgctacacaatagctgagtatgtgttgattctttaataagttcgaatgacgacatcaaaaatatacacagcctatgataatcacagccccgaacttggatatttctctaattatttttccttttctcattttactacaaaaatactaagaaaaatacatcctcttaggtacctgcattatactagttactatgcttaggggttacctgtattacctcatttaatccttacacttgactgctgggatgatgttattcctatttacttacaggagaaaatcaagaccagagaggttaagtgcatatacaaatccacggttggaagcaatcgagctggaatctacacacaggttcttctgattagcaatatgtcatccacagttcctgacatattgagctattgctatgtaatgaaggtcacagtgactactgtggagcatgtgagaaaatataaaattacttatctaactgatgagtctaatgaacaccagacgatgttctctacaatcggtttctttgatacagatacgtaactgacttcctttttaattgaacagaaggaacatattattgactcacataacaagggatactttcagaatgtatagtaatttgttctgtgcaagaaaacctgtttggggccacactttttttctgaagggtaaccttcaaggtattttccctgaaccattttttttctctacagattatagaggatctgaaagactaagataaagcactcccattagaagctgtgatgacagacgaacgagttgaatagtgacaggcagtgttgggtccttttcctatttctttcatgaaaatggaaccgtcgttcattcaaccaggagcctggtcaatacggtgagctcctgtgtgtgtacaggaaggggcctttgataattgcataaggcagacaattcatctggaagctctagaaaataagaggtggaaaaatgagctctcaatgtccacctgggttttgaaaaggtagatatttgaagttgtggcaggctgctttgtaattaaactggtcgctgaggtcagttttcatagcagtccaattccagatgtgatcatagcgtcatgagccatgcctttataaatgttacatttcctgggatcaaattatttgccagaatttacttcctaatttaaagagtttaaatgccacattattttgaatagtattttgctatactggtgtttttgtgtcatggaaaacagtcagagggcatggcatggaatagcaaaaaaaggaaaacctccttccaatttctgtagagcagaattcactgcattcgtatcctgctgtccagttttgattcaactggaccaatttctcttttagctactatgataaatgtagtgtttactgaaaaaagctgatcctattttctactctcttatatacctatcttgaagcgtcagaatgctcctgttatctggaaacataatccattatacatagaggttctttctcttctgtgatttgaacctagtctttaatttatttctattttgaactgaatgtaaagctgattacccatcagagaagaagactggcataatcaagtaagacaagggcaggctccttggaatttttcttggatagcttttctaatagactgaaactaattctgagactctacctgtcactatgcacagcgcctaattcccatgcagctgaattagtttgtgtgaaatactctctttctgaggccctagtcacttagaatttatctcagctctgaagcaatgactgttaataacctgaataattgtggaggcattcccctgtactaaaaattatacgcagactaaatcaccacaactcgattatgatggatgcaattaaaataaattatgtaaatgtactataagaataattagaactagaaatgttgatgagttaattgccatgtctatgtacttatgacacagaaatcgaagaaatttggaaaaaatttagattatcttaaagataaaacagatcaaaaagcatgaaaaataattcggtaatggggacaagagaagtctcttcttgacattcactcaggactttgcaaaagagatgaaggtcgcacaattcactacatggaatttagggacttgacaacctgaaggctgagtgacaaagaggcttcgtacaaactaaaggatgaattaggagacagaagtggctttactgctcaataattagaactttgagggaaatctaaggtcagaaagtaatggttaacgtggattaatatatattcaaaaaacaaacttttaaaagaataggaaacataacatcagtgtgaactcaggcttttgtccctcacttttaagctgtgtccgttgtctgaaagcattggcaaccctgcagccctaagtaccactgcagccctcgtttcagctctaaatacaatactgaggcaaatggtgtcatctaaaaaaaataaaaataaaagacctagaagccagattaaagaggctcctgcagacacaggatgagacaaattgaaaatcaaaaagaataatggctgcaactgattaaaacaaattatcgctccatcatttcataataacactcaaaaaaggttttaaaaatttggagcaatgaagcaaaatgtactagacacttttggaagctgctaaggcaccaattcatcatcatcttaaacttgatagttacagggaagagtaagcttgtattctgtccttttagtagaaattgttctttggactaaccaaaagaacttaagatatcagtgaagttttcaaacaggagaaatggtagaaataggaaagcatcattttgtaacttgcagtgaaacaaatttttaaaaacaaattaaaaggtaaaggtgtagttctgttactgctttcaagaaacaagggatatgtaaaaactaatgcaatgagggaaacatttttggatcctgattcaaacaaactattaaaaatattgtttagacattaggggatgtttgaatatgaatcatgtattagatgagaatatgggtttttaaaactaattttagtaaaagaaataatgcattgtattacataagaaaaaaaattttaattcatattgaagaatttgagtaaataacttgatatttgaagttttattgaaggtatcccagccaaaataaaatgggagcagggagaatagacaggaataaatgaaaaaaaatggcaaaacaaataatgtttatgaggcttagtgacggatccatgtggactatattttcaactcttttgcatgcttagaaattttcgtaataaaaagttttttaaaaatcaaaacactgtttaggcataaacacagagagacagacaatagaaggtaataaattaacgtcaattgccattatctattgatttttatgttccctgagatctttacataaaattcaaggttgtaaactctaaatagatgcctacacatgtagtaaatcgggtgaaaaatgagaagtagcagggagttgtgacctcaggcagaaaaattaaccctgctaacttggatggtgacagcttaagtgtatgagtgataagaagtgtcagggagactttagcatagtgacttggggcactgatcttcctgggcatcacctctgtaggggtgtcagacatgaggtagatttgaagaacaaaaacaaaaaagcatattcctagataatttgtcacatttcaaatgtttactgttcggttctgttctcaaaagatccaccagcgttaatagcagccaggcgcagtggctcatgcctgtaatcccagcactttgggatgccaaggcaggcggatcacttgaagccaggagtttgagaccaacctgctcaatatggaaaacccatgtctactgaaaatacaaaaattagccaggcatgatggcacaagtctgtagtctcagctacttggaaggcagaggcaggagaattgctgaacccgagaggtggaggttgcagagagccaaaatcatgccactgcaccccagcctgggcgacagagagagaccctgtctcaaaataataattaatcataataatattgatagcaaacagtagtattacggttaaagccagggccagcttcgtagccatccagttcgcactggttcctatgcttagaaagatcccacatctggtttagtgctgtgctgttgccatcttgggatttctagaaattttaaacaaggagcctcacgttttcattttccactcgacccttcaaattatgtcaaaagtcctggttagagtggcttatatacaaagtttgtagggagtagatttagtgaacttgatgaagttttatagttcattctcccgaaggagacttgttagtcactgaagagtcgcttcacagtatttatttttctttttaacttcccaactcttttggggacagctaagtaaacacagcctctagcagtatggtattacttgggacaatattagcttcataacaatgacacacaaaagcaacatccaatttcaaaacgtgattgttctctagatcaagaattttgttctgaaatataattttcagatataggtgtgcttgctgatagttctaaaatattgagcttgatataaaggcaaacctgtctaaacatatggaattcttttggtagtcttagccatgctaacaaatatgttttctgactacagcttttttttccccactgataaaggaatattttcaataaggaaatgatagcaagtcttgtagttactctttggtatttgcaaggtaataaccagctaacagcaatgtatcaatgattgcatttgtgtagacatcttgaccaaagtcacacagacagtagcagaaagtcacttgtcactgtgcagctggcactcttgcataataaggattaggatagccgatgttttgtcacagtgccaaagttaatcatggtctaaggacattgaaaaaaagctgagaagtgagtgaattaatcatcattaaaaacagatttaaaaagtaatcctgaaggggaacttttaagaaaaaaatactactttgaataatacaaagttctttcaatattaaaaaaatgaaagatgcttctagaagggactccttcctctaagacatcagtattataactgtaggcaggaaatcattttctagaaattaacctttcagggcaattccatcaaatcatgagtttttattgctccaaagaaataaacccttcatcagaataggattctggatccaagtctctttggcatcctccctttagtgtctttatcagagttagctacagaacattaaagttccagaatacttaagtcagtctgtctgttagacttggagggaggaagatgattatttaaatagtcagatagttgtagcatgaaaacaagttattaaacctctggttgaataacctctgaaaaaatgcaaatgttaactttgagaccgatggaataatgtcaccctacctgtttttaatatttgagaatggacacaagcaaggggacataagggtaccttcctcttgccccctgcaaactggctgccaagggacttgtaatgatggcagctgctttgggacagtcaggcaccaatcctctgcccaaatagtcatttgttcttccactcctaactctttgcttgcctgacattttctgagagattgcactatttttcttttcttatgtttttcactcattttaaagaacgcttttttctgaataagctgtttccttaaagtattcaaagaaacaaaattccaggcagaaggaaatttgcattctgatgttgtttagagttccaaagcctgatggatggctgccttctctgtagctcctccaagtcatttcagatctacaggtgcttcatggcctgtcctaaacctgtaagacttgaagtcttataggcttgacttgtaccttaatttccacctccttccatgtaaataaaataaaaaactaatgcctacattagcactggataatcatgaattgttgtttttgttctttttttttaacgtaagcaaatttaaattttctactcttatttctctcagttggctcttgtgtttctagacatactccatagttggtttccttagagcttcaggtaaaaatcttagcctggatcttaataattatacctgatggaccaagagctgggttcagtcacatattgtaaacaatcaaaagctaacttatgaacatatggcaaatgtaattctttgataagaaacaagacagcaagttgccgtcttgattacatagatgtaataggattattgtctttagctatctgttcttgaagtacatacgtagcactttatcaggaaggcccactgaaaaacaaacatgcaactctggaaagatagatttgcttcaaataattaggaaatagaaaaactgtgatgaaagaaaaatagggaatttatttacaccttcaaagtctcttagaatatgtcaagtaaaattgaaaacgaatcaaacacggaaaagaagcaaaattcttcgctgtaagatttcaggaaatacctagctgctaagattcagcaatttaattacaaaactggcacaaaggcacaatttagttgtggtgaggaaatttaattctcctaacatcagctaaaagtctgtttctcgaaaaattgggacacctgttaactgttttacttatctcaccgaaaatgtatctcttaaaagattactgataatgtcacactctcttttctttagttccaagaagttcatggcagccatcatgccaggcaatgagaggacattcctactgctttctctcccctaagctctggtttagtttctgatgccctgaacatcaaggaagagccaaatatcctggccaaagctagttcagctgtgacagttggggtagggagaggtgacgtagtaaggatccttgaccttggttttcagtaagttaattaaatatcttatgactggacatggtggctcaggcctgtaataccagcactttgggaggctgaggcaggcagatagcttgagctcaggagttctagaccagcctgggcaacatggtgaaaccccatctctacaaaaaaatacaaaaattagctgggcatggtggtgtatgactgtgggcccagctacttgcggggctgaggtgagaggatcacttgagcccaggaggcagagattgcagtgagcccagattgctccactgtactccagcctgggtaacagagtgagacactgtctcaaaaaataagtaagtaagtaaataaataaataaaattttacttctagcagccatgggcatttgcttcaggttattctgaagaacaatgctattctttttctttagatttccttccagaaaggaattcttcttagtttcccgttcaatctctcaaggtaataaggtatattttattaccttatttattgttttctatataataagcttttcatgaaggcttaaagagaaagtacaaattattattgtttttctttgacatttacatccacttactgttcctaaggacaattcagtccctcctcccatgcgtaaacctttctatctgattagatccaggttgttactgatagacataaaattattttataaaaagaaattatgttcaatgtaaaaatagtaatccattttaaattcccttcatttctgcagcctgtttctccagacaactcaaaattgtctgaatcccataagacagtttctctgagcatattgtttaatgagagaaactttagacattctgaataaaacaagggaattactgatgtcccaatgctctttgcaatgagtacctccggtttaccattgtggaggaaatattgcattgactttctaccaaaatccatgtcttatctggaagaatgcctactattcattgaaaatcatttccagacctcagataacacaaggaaccagactgccatatcagactcacaaaaatcagagctcttacaaagtatccagctttcctaataattcaaaggatgcagatgatgataaaggcaattcacaaaaatgtctgcgatcactagtgcagctcctcacatcctgtgccacacgaggatgtgggctggtccagatttaatgtttgaggtttctaagtgatgcatgtaggccatcgtttccacaaggaagccattgtggttacgaaacagctccatttgtttgctccataattatatctttgacctaacattttccactgggccatatcccacaaccccaggagttcttcattcatttgctgtaagcaacctagacagactagatacaccccgtaaaaaggatgccacagaaaagggtctcattacctttctgctagtaaataccttcaggaggcctgattagtatgtttccaaggattctttactgggtcatttctctctctctcttcctctcccttctcttcttggacgtcctcagagaagacacgatgggttactaaataagcccaaaccctttccttctcaagaaccatttctatagcaaatgttattacattatgaccttttttaaaaatgtgtgtgcccctctccatatgatgatttatcatttgtaacacactcagagtgcacaaaccatcagaaatccttatctactatggtaaaatttgagcttcacgggaaaaaaaaaaaagaattgaagaacttccaaagagttttcccctcgtctttgtgactggttgcttttactaccctaggaattaaatgtgatttttccctttaaacgtcagatttgggagtattgctccctcttctgctctcagcattcttactcaatgattagtcttcaacattctcacatactctcagccactttgagtaaacgaagatacatcattcaggagtgagaattaattgtaaacaaaatatttagatttaggaagattaaacatttttaccagagttatacattacagtttagaacattaataaatcattgtggctgagttttacaactgtttcagtttcatgtcaagccatgtagataatttttcctggccttctgctccttagaatgaccaagtcctttgaggctgaatctcaaggcaaatggagaaatttcttggttgaagtcaaaccagctgacttaggtagttcttgttcatcaatccattaattcaacaagttgccattaaaccttgtgctctgtggacagtattatcttagattttgggaatactgtaggaagcaaggcaatcatggttctggtcctcatgattctgacctctttataaagacctatagaagaaatcaagaaaacaaattcaactaaagtaattacaaattgtgataagccaaaggatctttgaactgggctttttatagcagttatattcttatgaggttattcaacaaagataactagcacacagaagaagattgcattatggattccggctgctggcattatagtatatggcttagattaattttcatgagattcccaaagaatgaaattaatcatccagtaccagagaaaatcaataaacttcaagctgctttgaaaatactaacataagaaggttaataccttaattgtaaagttatctgaaatggtattaatgacaaatgttttgtctcttagaatacacattggaaacttcctgaatgctgctgaaactgacgtgaattttttcctttgcataatttaatctttagatagtagattccaatcaagattttctgttccaggtacatctttaagcctaatcactttcctctttcctgcttttctcttcccaactccaagcacatgcctgtgcttataaaaaatgacattcaagttctgttttgaatagagtaaggctttagaggtttccttcaaaacagaaagccccgaagtgcctgtttctgtatattcctcctgtacatcctcctgtgcttcaacaatcaccattttaagtacctgccattaattcatccaacccttaggtatcaagccccagtgctgtagaaggctcaaactaggtggttgggggattattgtcacagatgctgtactcgaggaggatataacttcatggggaatatataaataataatagcaccataagttatatcttatcaggcattgagctgtaagattggagaggatggtaataattgtgtatattcaaagtaacacctgaagatcttttaattaatccacaaagcacagaatatacagttctactcacagattaatgatgatctaatgaatccattaaggctagattttcctctgtcgctggaacaaagaacagattcttcagtcaagcaccaaatagagtgggtggctatgtttatgggctatggcatatgaaaaaaaatacatgcatgttaatgcaaaagtcagtcttagtatattaatacagtattagtatattcatatactaactccatgagagacacagggagctacgatgaagacaaaagtaaacttagaatttccatcatagtctcactaatatttgaagtgtatatactcactgagtagatcatgaacacatttatttttctctaatatgtttctctctctctctctctctgtctcacacacacacacacacacacacacacacacaccattcgggtcaacagaaacaacataagaaaagtttcagaaagcataaattaagtgacatcaatggagcaaggaatatatgcaattagtaatagaaaatagtaacaaagtatagctgaaaattcatatagaagaccatgaatattaagcaaaatttggactatattcagtagtttatgtaaagccactgaagatttttgaaacagatagtgacattatgagtttgctgaaaggcaaacaggatgagttcagttgtaagcctactgaatctgagctgctgcggaggcaattagatgcactcatatctagctactgggaagtcctaactagagatgaaggctgatgagccatttccagatgcttttttttttcaatctcttcagtgcctagaacagttccaggcaattaattaactggaattaactgttaattaactgtgctcagtaattaactactgaattaatagtatttatgatattaaggatatgatgcatacataactaaacactgaatggaagaatagatggatgtataagtggggggagggagggagggaggaaggaaggaggaaggaagaaaaggaaggaaggaaggggaaggggaagaggaggaagggaaggaagggaaggaaaggaagaaggaagtttgcctcttgaatttttctagtctgaacctttctactaaatatctattgtgttgttcgacagttatttgtaaacatgaggtcagattctgggcaactttaggcatctcaaaagtttgttgtatgtgcaatcaagagtaaagatccggctgggtgcgatggctcatgcctgtaatcctagcattttgggaggccaatgtgagcagatcacctgaagtcgggagttcgagaccagcctgactaacatggagaagcccccgtctctactaaaaatacaaaattagccaagcatggaggcgcatgcctgtaatcccagctactcgggaggctgagacaggagaatcacttgaacccgggaggcggaggttgtggtgagccaagatcatgccattgcactccagcctgggcaacaagagcagaaactcagtcaaaaaaaaaaaaagaaaaaaaaaaagaataaagatccatgagcagccaatgattgcagctgtgattgaatcactttagttatgagatgcaggctgtttggtggtgaaagctgtggtgttgggagaaatgagagggagaatacgatactttacaaatttttctttttttttttttggagacggaagtggcagtaggaattagaagagcatcttagcagggcatgccttctgacagttgcaaagaagagaagcagctaaaagaagactaaaggtagaacagctctcctctctggggaggcaaagagccgttaaaagttgtcagtcacttctaaggctagcactgtgtttgtgtttctctgaagacttattacatatggcaagttctacgaactggaaagggggtcagaaaggcattgactataagggcaagccaagcccttcttgcttcagtagtttcctggggcatgactgttttgagacagctgaacacttcagtcttcactctcactacccaacacagagcagcagtgtggggagctaagtcaagttgagaagaatattcttgcttgctggactgagagcacaagcctcaaaacagagttcagaggatgttagcaagtatctggcatccctgccttctaacctgcaggctcatcttgctgataaggtgcgtgccattccagttcctgggatcagtccagtgctgagtcaaaacagaaggagctcaaatttactcttggttgcaccctgacactgtgatttctgggttccagcctttattctgtggccgtaccttatactttacctttgctgtgtccatagctttttcccttgttctcaaatctctatctcgtgtattccaaccctgtttgctatgggttattttcttaggtacttggtgtcttgccctacaccatagctcacaggtggttcttggcacctgccatctcagccaccagagcccagcctctacagtgtagagtccctccatctaggagggtcaactgctcctcagtggcccttttatttggctattctattactccaactaaaactctcctgctcagctacacctcatgtctaattttgcttccactccaaatacctaattttcagctataagctgaaagcacactccaaatacctaatttcactcttgaggcattttcaatcctccctgattttatcttctctgttatcacctggattcccagattgacatggagaaagctatgatatggctccctcctatttcctagtggaaggcaaagggtgcctgaatcacaaagttatgttaaccttaaaattgaacatagaattgtctacataaattcaaaaggttgaatgtaggaaaaaaaatggtgagtcaatataatcttggtttatctctgtaatataccattaaaactcactgagaaagatcactagttaaacatattgtaaattctggaaacaaaagctgctgagttctgctgaaatagcccaagagtaaatcacaacacctacaagatgttttatgactaagttaatttttttaaaaatcagaagtcatcatatctctgcttggtgctaactaaaaagccagaagttttggtcagaacaaatgtagttcacaaacactaaggttttggttgttcaaaataaatcacaacaccagaaacttagaaataataaatataaacatagagccctcttttgtggcttttctaaacaacttatttctgataacttcataatgctgctgaagctggtcgaatttaattatgcttgtaaagtctactcatttgtacatgggtaagtcaaacattctggttttaaacagagtaagaatagttttctaaaatatgtagtcagtcatgtcaaacctctggctaaagtactgttattttggtgcacatattctgagtttccatgaaacaaaacattcaacacctatgatattttatcatactcagcagttcaaaagtgccattcatttctgaagagcttgcagagtataagctccatgagagagtggagagagtgcttcaagatatattctctctgtacccctaccagtgcccatctagaagacattcagtaatcacatggtgaataaatacatggaaataaagtttcatatcaattaatcattgggcaagagaatgttttctggctgctttgtccattgttaaatctactatgagaaatttaaaggtaacaattaagatgagacccagaaaagcactcagtgtcatgagtcagcagaggaatgtttttgaaaaccacagtgatataccatgatgcatcccagaatgcctaaaattaaacatatcaacagcagcaagtgctggccagggtgagaaatagcgagttatacatcgccgtttgggatgtaaaatgttatgaacactttgagaaaccatttatgattgcgtataaagtaaaaaaaacatgtggttatcattatgatacatctattttattttcaggtgtttacccaaaagaaatgaagacatatagccacataagaacttgcttaatttgaaatatctcctaattataactaattcagcagtttattctaaatcaacatggaaatgaataaacaagggatgatatactcgtacaatggaatactacccagccaaaaaagggaggaaagaacaaactgctgacattggttacaatatggatgaatctctacaacaccatgaatgaaagaagcaaactcaatgtagttgacactacgattttatttatatgaaattctagaacaagtgaacctcatctatagcgatggaaatgagatcggtggtaggctggggccaagggtagacagaattgaccacaaagaggcacaggaagtttttggggttgatggcaatattaaatgtcttgattgaggaggtgacacagatgtatgcatttatcaaaactaattgaactgtacactttaaatgagtatctcttatggtatgtaaattacacttcaataaagctgattatacactaaataaaactaagacaaatttggaaagttggtacctatgtttataattatagacttttaaaatatattctattatgaataatgcttttagcctatggaatcaattcttcataaaaactcattacataattttttgatattgcttgtaaaatcattcctttagacctattgagtaataacggtgtaggtgaagtagaagaaaggttatatgttaacaagatgtgtccaggttgatcagtatcatgatttatagtcctcctctggtatccgtgagggagagggagagaagggggtagatattgagtctgattcatttattgacatcattggaactttctggattgtttagtgtgcctatggtcagtcttaatcctagccttaatcctgaacttttcaagtacttgaagcaataaattctatttttgcttaagctaattcgtattaggtctctgttcattaattcttttgtacaaaatttcgaaggaacggaaaatttaatgcattaaactacacataaagtttggtagatattttcccccaaaatactatatcttgttctttctcctgtatccctcatctgttctaggtaatcaactaatagttttttatgaataagaattaaatgtttctactttttattgaaagatttcagattactgaaaatgtgacaaaaaatttctaaaataagcatagatgttccttctatgaaaaaagtactgacaatttatctgttgttaaatcatcaatatattgtaccagataccattatttactccctattgacttgttgaagtttaactaaattaactatacttaatccatttctaccctaaacatttatttgaaatcattactacattttaaaacagttgcttgatacaaaagtattttctccatataaataagggatacctttaaattgtttacatttgtaaagtacaatatgtaaacagaattttgaataaattaagaatattttcactgtactacctaaaagcaaacaaacaaacaaaacaaaacaaaacaaaaaacctcaaacgcttctcagacttgcagtttgagctaaataaaccttctttattttggtgtatcactgacagctctgagttgactccaggacaattagaaagaaatttccgtaatacatataatttcctaaggtacaaattttgaagtaaataatggatgccacaaatgtaagttggtcacttatttcttttttctcttgtccattatcttcagatgtgtaatcatttgcaaatatatttactttcaagaaaagccctttttattttactgcttattattactgccactaaataatattattgtttatagggctgtgttctatgctttaaatgcattattatacttaattttccaaacatacatgtaagacagatggaggagattgggagtaccgagagaatgaaaggtgaggctgaatccatagtgtttgcagtatccagataggtgaagtaagaggtgaagtgtcttcatgtgagaaagaattggtgtacttttcagagaaacaaaggctttcttacaggaaaaataagccacagttatagttgcatcatttgtcaagagatttctaaagaatctttcaagataggaaatgagagaaagagaaagaaaggagattatgttttttctatgggagcctgtaaattgaactgaaatgaacagtccataaacagaatggaatatctagggtctggatcctagttccaggcagcttatcacctgctcccaggcagcagaagaacctgaactattccagtgaggaaacaatgctttcactcttgacagtcttccctaaacagtagcaaaaacttcctttcagaaattgaccatgatatcctcaaagttttggtatcaaaaggttttttatctaatgtctcatctgaaaaggttgaagatcacagaaaaatttgagtacagaaatatgtttacaatattactcatcagaaaacatatctatagaggctaaaggggttatgttctgctgctttgcaaaactcagagaagctgagtgggaaggcaaagagttcagatcctaaaatgaaaatttgtaaatcgggaggaagtgtatggctgaacaattcatattaaaatgtatcatgaggccaaactttttaatagtaatctattcatgtcctatatgtaaactctttactatattagtgcttagagcataatttgggcttaatgcatatagattgattgagtgactgaaaagataaatgggaaaaatagaagaatacttttttattctctttctgaacttttgtcattaaaatgtgtatttatttcttatgttcccactgtctttaaaatagcatttctttaaagatgattcatttgaggccacttgtaataggacaaaataagcaattgatgactgatgtgcttattaatggcctcgggtgtcacagaaaacaactgaggcttcaggcaattcatctttaatggcattaatgataccttttgaaggtgtgattactactataaaccagagtcagttgtttatttcaatttattcttcagtatgagctacaaaaaattatgaactgaaaacaatactttagaaaggcagatactcttaaaattagcaaatagctttgctaaattataatataggtcattactgaaaaacacagatgtaaaattccacttcaaagaaggtactttattttccttttccttctagtttaataggagaaataagagattcttgcatcattttaacaaatcaaaatgcaattattcatagaagaaaagcaacatgttaatctttcttaaatttcttaaatgagtacttttggaaatgaaaatgaaattatattagcaaaaatttaattagcacatgtggtgaaagattttatatgattcagttagtagatttggtcaatttatgctaattggcaagtaatacaatagaatcaaattatgtatcatcagaataaagaggaataaacattacaataacatttttcaagtatactttccaaaaggtcatttttaaagaattcgccccttctgaacagcacatactatgttcgctgggagctgaaagagtgtgtcagaattatctggcacttaaacaccagcaaggtgtctggaataactttctcacaagaacacggtgtaaatatcatttttcttctgtttgattattttgaaaaacatgcatacttcatgtgaactatagtgaagtgtctgattatccaaagaaaaagccaatatttgaaaaggtgttattcacaatagagccaaaatagaaacagggtaaaattttgatggaataagtggtagggatgaaggaagagcacagagactatgcttgcatttaaaggcaaagcatacagtaattataactatatttctaggtgaagaagctgtggatgactagtatatttttctccacaagatatctataaagaccattgtttggcttgtattaacatttttgtttgcataatctgacttgggcaagatatgtataagaaatgcttagctataaaacaatagactaacactgggagagtatgggtgatggagtcctctgggttacacggcatgctgtggcatagtgtcctcagctgcaaattagagatgatgatcgtaaccaatttctaggagtgttgagattaaataagctagtacacgtaaatcacttagtatagactcaggaaatgttagctcttaatattttgactctactgacttttttcgtttatttttcctcaacaaagaggacatctttaaagatttgttcattgtccttatgtgtgtgtgtgtgagagacacgatatacacctgtccttttgagcaagagtcaaattctcattgaggtcaaggtgtaatttgtagttcaattccttattcgtaaccattgaatgtggctctgccacaccaaggtaaacgtcttgctgtctccattatgtgcttgggttacaggttgattacacgtgatctatgataatctacaatctatagtctacactactatagtgttgttgtttttttaaaattatttccttgcctaaaagttctatttcaaagttgcaatactgcaccataggtttccctctactttctgtgtaacaagatgagaaaaaacaaaagagggaggagtggggaaatggataagataaacaaggatttttagtttccaaagaaactaaaaaagtcattatagaattaaaatatgcgctaatggcgataaagagtagaatggaactgtttgtgtatttgctttgtggctttctatattttccaaatgttttgatttactatctcagaatagacttagataataaaagtaacaaaaagaaaatgagatttttttaaaatatcttcacaatgatataaaaatatcaagtaattctgcataatctaatggatgtgttagttctctaggggaaaaagtataaaacttaatgagagatataaaagatcgaaataaatagatgaagtgtgatcatggattggaaaactgaacattttaatgatgttactcttccaaaattgatctgtagagtaaatgaaatagcagtctaaattctaacaggcttttctttggtgaaaataaataagctggttctaaactgtagatggaaaagcctagggccaagactagccaaaacattctagaagaagaacatggaagaaatctttctaccatacataaaagcttattgtaaagaaagaatcataatgaaagtgtaatttggcgtaagaataaacacataaattaatggaatagaatagaggactcaaaaattgatatatgcatttataaatgctagatttataaccaaggtagtgacaaagagtagctacagtaaaaataactatgttttaataaatgaggctgagatgaatcggtgtacatttgaaaaaatgaaattggcctgttgcatcacaccatatacaaaaagcaattcttggttgatgacagattgatgtgaaaagtgaaaccataaagcttttagaagataatataggaaaaatcttaataacctcaggttagaacatacttttacacacaaaaaagcacacatcataaggaaaagaactgaagaactgtgcatgaaaagatgctacaaataaagtagagaggaaagctatagaattaaagatattagcaacatataactctgacaaagaactctcatccctaagggggctgaatgagcctttgtggttgattcgtgggtgacatttctaaggcagggaggctacagctgcaagaacaaagtgcctttctattttgttaggccagtggatttgctttgcttcttgttggccttccacatagaggccacaggggcattgtacatagttgaaatttcgttcacattctgacattatatagggtttcatttctcctttgcagtgctgtggttttcattttttctttgtgtcttcatatgtgttttaggcaggatttgaagttgtctggctcaaacttcaagtcagatgcggtcttaaccctttttttttctgttcctaaaatctttttgtaatctttactgtagaattcttaatgttgacataaatttatgaatttgatatattttgtgttttcctatattctctgaaaattatatcacaatattcttctgtattgaaagatagtcctatataatatttctaattgaataattacaatttctttgttcaggttgtaagctaactaatttaccattcccttatcctggggcattttagattccctttttcataaagacaaaaaaaatttcagtgagagacttcttgaataaaacttacaagccataaaattatattttagataagttctctggagtaagataactaggtcaatgtgtataagtaattgtatgcttttaaaatatcttgtaattggccaggcatggtggctcacacctgtaatcccagcactttgggaggccaaggcgggtggatcacgaggtcaggaattcaagaccagcctgaccaacatagtgaaattgcgtctctactaaaaatacaaaaaccagcctggcatggcgcctgtaatcccagctactcgggaggctgaggcaggagaatcacttaaacccgggagttggaggttgcagtgagccgagatcgtgccacagcagagtgacactttgtctaaaaaaaaaaatatatatatataatatatatattattctctctctcgctatatatatatatatatatatatatatatatatatatacacacacaaaaaaaaaaccacaaaagaggtgatttttttccttttgccttgtttctcaactcacagagttgcacagctgcacagttccagtacgtgaattgacttctactttaatttatcatacctgattcagtaagtgattctgtaacctttactttcaaacatctctgacaccattgccttctttcttctccattgtcaccttcctccccagtgaacagaggcagcagtaacctaactggactctagccttgcactgaatccttcttctagcctcagactacttcacattgcctttagagacatctcccacatacagtcataaccatgtcattccacaccctaaaaactccaacggttctcacacaaaatagagccagtccttagcatgtcagaacttccacacttgattcagccacctcatcagagtcatatccacaccctctttgacctgtgatcacacaagtgaattagccattcccctaaaatgacttaattacaaaccatatcccaccacttatgagactgtgcacagtctctaccagattttcagactttctttaagaaagttatatcttaatcatatatgaataccctcatcttcaccaccccatgcctagcagaaggcctagcatgcataggatctttttagctataactaaaggactgaattgaactcaactggattgacggatgaacaatccttactcaaaagatattgaatgttcagtatttttttaatggaagtaatttatgctggtgcagaggtctctttatgacaagagcccatctgagattttgtaggaacacttagaaaaggatagaagtcttgttcattacagaaactgataacacaaactagttagttataactagaggtggtgacttacacctatagccctagcactttgggaggccaaggcggtcgatcacctgaggtcaggagtttgagaccagcccagccaacatggtgaaaccctgtctctagtaaaacaaaaacaaaaacaaaacaaaacaaaacaaaccttgaaattaaagataaatgtgctagaactagtcatcaacatatagtccaaaacaacaactaattctgctctctcaattttcaaactataaagaaactggactaccttctagaaacttccaatcccacataaattcaagccctaatctcttacctggactgtggcagtatactacctcttaactgatccccttccttcttctttgtactctccaaaatattttcagtgccccagtcagagtgatcctgttaaaacattagccagatcttgccccactctcttccagtctaaacttcctaatagcttcccattacactcagagtaataaacaaaaaattttttttaataatcaaccagaacctaaatgacttgattctcactacctcttaaacttcatctcctactaccttaactttcatttactgtgttccaatcatattgacctctttgctgttccctgaaaaatcacccacttccctacctcagcctctttgatttttgttgttttctctgcttggtacgttctcttctcagatatacacacaaccacttccttacttccttttgccatctaaaatttcgactcctcctgccacagtagttaataatgcccttttctgctttattttggtctcttggcacttaatgctatctggcagggtatagattttactcttatgcattgtctgcctcaccaatggagagtaagctccatgtggaaatgaatttttgtcatttttgtttattaatgatttcctgaaacctaggacagaacttaaggaatagcagggaattgattatgaagtcaataatgagcaaataagaaattccatggagaagaatttgctttttggttcactacatgacatagaatgagacagatatgacaacatggtttaaaatgtttaaaaactgagagggttaaaacaatagaatttcttgatggaaattgttatggactgaatgtttgtcccaccccacctccaaattcatgcattaaagcctagctctgtatttggagataaggcctttatggaggtaattaaggttaaatgaggtcataagggtagggacctgatctgctaggattagtcctcataagcagaaatgccggagagctcactggctccctgccatgtgaggacacagcaagaaggtggccatctgcacataagggagagagccctcaccaggaaccagattggatggcaccttgatgttggactttccagtctccagaactagaagaaataaatttccgttaagacacccaggttgtggtatcttgttacagcacctgaaggggactaagatagaaatgtaccttaaaactaatctaacctaagtctcttacttaaaggataagaaaactgaagccagagaagttaagtggctttctaaaggtcacaaagtcagtatataccagaactaaacccattaaccacgtggcagttcagtgctttctctacttactatgctgactcttataccactctatgtagtatatgattaacataaggcagacattcttaaaccttattctcatggaactctgttcttccaaaggctgtagcaggcattttgctattaaaagttaagggtgatggtcttttcacaatatcttatgggggtatttaactgatttttttcactacagttttcactacagttttgtgttttttgccaataaatttttcttttcctataaatacaaaagaaatatatatatatatttatatatatatttataaatatatttatatatatatttataaatatatatatttatatatatttataaatatatatatatttatatatatttataaatatatatatttatatatatttataaatatatatatatttatatatatttataaatatatatatttatatatatatttatatatatatatctgaagaaattctgaaccataattctctaaaagtaattctgtcctttggagatgtagtaggatggatacattaaatatgggtaaattttctgctggtacaattgatcctaattcaaatgacagaattaatgctactcagaattttattgtggggatcagaaaagtcaaaaagagtcccttgacttttcagagccctgcttcctggacttgtttgaaaggcactgatgtaacagcatgacacagctgctcaaaagctattatgagcctaggctgaatcaatagaagataagtgtgcaaatcacagagatctcagtccctctggacttggcactattagaacatgtgcatgttattatatctatctgttgtctattcctggatcctatctttaaggtgttactgactggcattcatgggtaatgttaaaggaatagggaatagtttgggaagtgatgacttaggggaataagaagctgttttcagaactttgaagggctgaaataatgagggaatggatttgttttgtattgtttcatgtgcaaaatcaagctctgtgcacaaacactgcagagaagtagtttttcactcaatataagaccaattagagttgttatccctggaactgttccctagtaaaagtaataaaatgtgttgaaaagtactagaaatgtaccagccatcaatccagaatatacagaggaaatcctgtttaggaagtgatttaaaacagttgatctcaaaaggctattacaacacaaagattctgcccttctatgaatacaaagaactggattatttattataacgaatatgttacaagcaagtgcaatggctgggttttttttttttttttcatgccttgtaaaggggaagagggtaaaggtagaaaggccctggatgactaaaatgaatgtaaaaggaaaaagaaaaaaaatgaatgaagaggaaaaaggaaaagaaactgtaaatgcacaatttgcctaagtcttggcctgtttttcaatgagaaactctgcactgagataaattctattcctggtggctgcccatgcacacacgtggattaatgccttggctgtcttaaaaagtcagctacagtctctgagaccctcaatttttacttagctgctgagatattcatgaatgctatataaaaggagaaagaaaaccattagaagaaatattttcaaggatgatatttcaaattattgcttatttaaataaatattgctaccttacattaaagagataataagatactaaaagcttgaaaattttttttgattctaagagcaggtagaacatacttatccttaaataacaccttttccttttaataacatctaagcaatgagatttttacctttttttcttggtggtttcttctttagtcatttgtttctttctttaatgagtccttcctaatgatgttttatttttcacacttttatctgttttctctttttattaatgcttatagtattcatttttatttttgtagtatattttattctttttctcttttgaaaagtcatacttgaataaagtacatgtctcaaaaaaagacaaggacttttgcattttatattgattccttaattttaaaatttttaggttaagaataattctgtactatccataagtattgctttatgatgactatgcttaagttgttggtatatgttataatatagcatttcaaccccaaatacagatttctgttctgtactcttgggaatttatggaggaggagaagacaaaatttaccttcttcaagtctaaaaattatcacatttgggacacataaatccccatgtatctctttaaggacagcatattatttttaaaattaaaatataaatgtctaaagtagagaaaaaataagttcaccttgtccttatatggaaattaaagatggttgcttaaagaataatttagaatggcaaatgtctgaaggtttgctgtaaattccctgagatcttatatgatgttcacaccgactcagacacatacaaatgtcatctctacagaacggccctgaagagagcaatcctgggagcccggttcccctgttgaggcccctacttgggtcagccctatagggcagcagcttgtacactgggccctgctccccttccctctcctactgacttcaattccattgttttttcaagacctttctaagtggcaggaataaaactgatgatttaatctataccaagacattaatgattaatagtggccccatatattttcccttacatttaatgtttgtattataagggctttttatgccttagctgaaagtggtggtaggaattttaggcccacatcatacacacatctgcaaataaccaatctttttctcatagctataattatgcattggcattttatttacttcctgcaatttctctaagtgcatcattttgttctatatatagtattttaaataatacatctttagcctgatgtatttttgaaatatttgtggatgctaatcctatctctgtcacagagcttatttatacacacacatctttctcctcctgccttaaaccccttggtttattcttcccttgttccagtttactctcctatggaactttttaccatttgatgagatatttttaaggaatttgcagataataggagcttccagaataccttcacctgactcatgcttcggcataaagtccccatattatcccaaaactcatctacatgtttagttttcaattttcttatagccttttgattacagtgccactgaaaatatgtcatatttattgctttatccactgctttctgaacatagacagagacactgtaatatttttctaatactttggaataaaaagaagatagattatttgttgaataaatatgtaaatactaaaacacaagttactttcttgtcatcatgctatagtcttcatatgctttacacagagtatgatttggggtaaaccctagtaaagctgaggaacatataaaatgttcaggaatcacattctggaataatcatttaatgtttatgccatgctaaaagagttgggactattatctgtggaattaaaatttggagaaaagaaatggtaagattagcccactgattgataagccagaggtagcacctgtagtttcatggaggccacagctcagtgatacctcggtccctgaactggaaaataaagctaagcttccatttgcagatgttccagaaaaaaataaattttatatttgtgtttttactgtatttttggtagagacggggtttcaccatgttggccaggctggtcttgaactcctgacctcataatctgcctgccttggtctcccaaagtgctgggattacaggcctgagccaccgcgcccggcctggaaagaaagaaattttatgaaatcaaaggagctgctatatctttttcttttgtaacaaacataggaattttcttactggaacaaacccatagttgacctcttatagtactctatgtgtggaagggagaaaacattggtacttctacaaatgggtttcaccaccttttataataaaaacagaagatattcacaaaaatagctaaaaataaggctagcatgagaaatacacaaattactctttttctattatgaaattagcatgcaatctttttttttgtaagcaatccaaccatttcaaagagggtgtaccctccagataatagtgaataaaaaattcagtgaaagaaagtaagcttatagctgctataattttcagaaccattatgcatcctcttgcagctggttttgttggtgctgctaagcgcatcctcctgggcccatccacttagtatttatgggcatcaactaaggattgaagacgggagattagaataaatgtaaatcttagtggatataagatttttgatgaaaatgtttaaacggtacttgtatgccacacaagaccaatggcaattttcatgttggtcgtaatgtttataaatttaggtatataaatgaaggagaaacgtagagtagaagaaaaaaagatctctgtctttacatataaaagggctgaaacaaataattactctttatgctttgtcagatggtttatagtttattatgatcaatgtaatctcattttttcaagctgttttttagcaatcccgaagtgcaggaagatacacgctgttgcaaaactgttaaatgactgaatcaggactccaagccatgttttctgacttcaagacctgtatttaaattcctatagtattcttggaaaatactagactcagggatgttttcacagagtaatatgttttgaaaaatgtgtctgcgaaactgccttaaaacttgctatctcctgcaagtcatctggagttcaccagaagtctaccttttcaactagtttccttatataggaattttaaaaagtgagcagaaaagcatcacactttacttttgagaaatgtgaggcctccttgaaagcataatctattcccttttaacaaatacatagctcacagtaatgcagagtatgagactaggtagagtgattttagatgtagttatttttcctatttccttatgccacaaaatcattttttcacataccttgtgtaattcctgtgaatgattttcaagggatcttttggcatgtacaattatttatcatcaaatatttgtaaatgaaagttctagaggatgagacagaatatagacagctaatcttacgactgctctgaatgacaggcacagaggcaacacagacatttctgaaggagcaaaatgtcagtctgcaaaattgcctttcctagtttgatattggtcctcactgctcagaaatgaaaacggaaaacattcacgaggcattctagtataattgccagtggctgcttcactatatacagttaattagtatatgcatccatacttttaaaaagcaatacttttacattaacaaaccaattgttaatttaaaaattaacaggttttttttaaagttttaatattataagaatatttctgaggtcagtatttatacctctacagatctacatctagccacagaaaatccaaaatataatttactttggaaataaagtttcccatctgctggtccttaagagtaattgctggtttcactttgaattatcaaaatgacattcaggaccaaaaaataagaggcatgaaactactttcattgctactgtcagcaagtgaatgattcactttgaatttgcctgaagttgtcttacagaacacctgtccaagctcattccggttccccttttgacgcttttcttcactcctctcctagcaaataaatagggtttcttagtctaacacaaggaatagaagtataagaagtggggtctgctagtaataaggcttcaggtatgtgccttaggaagtgttttgtttgtttgttgaatgtgaaagacttagccaggaagggagaataccatttgcatgtataattttccaggttctgtttaaaacaggtattcttttttctacttccaagtgaggagacaggttcctctgaatagagaaatcctacactctgcttaatatcactttctgggacaaatttggttcttatagttctccagtggttacagaatatcaaatgcagcaaggaccctggagcttcagtaactattggtaacttattagttgcctcttttgccaagataatggcaaaaaggaaataatgaaaatgacatatttttatatttctgtatggcagtgctgatattttcttagatcatttttctaatattagaggagctctttatgttgccttatgactgctgacatttcatttacttaataaaatcaagttagcagtagactgttgtagaaaggtagctggacactaagtagaagaactgggctcaagtctcagatttgtcccttttgcctgtggtaatggcaaataagtcacctaactccctggggcttacactgctcacccttgagaaaaagagattggacttgcagcttttacagtggcagtggacatggctagagcttggatagtgctgacggggttcaggaaatactaaggaggatgaagctttgcagatggtaaaattattaatctatgcaatcttcagttatggcatcacctgaagactctcagaatctccagttctatacttaatgaatgactttgaagaggaggatctatcaaaagactggatccctctgcatattgtttacaatcaggttagaacttagattaaatctcaaggaaaacaagactcctaaaagcttactagtcaaggaagcctttcatgcacctgatagaatcctccattcaggccgggcgcggtggctcacgccggtaatcccagcactttgggaggctgaggcgggcggatcacgaggtcaggagatcgagaccatcctggctaacacggtgaaaccccgtctctactacaaatacaaaaaattagctgggcgtggcggcgggcgcctgtagtcccagctactcgggaggctgaggcaggagaatggcgtgaacccaggaggcgaagcttgcagtgagcggagacagcgccactgcactccagcctgggcgacagagcaagattccgtttaaaaaaaaaaaaaaaaaatcctccatcaaagttggggtgactatgaagtagaatctctaaagggggccaggatgttgattttgttccagtgcgtgtctaatacccaatcagaagattatagacatctatctcaccatttgagtaaatgcaaaataaaaataaattactacgaaacatttgaaagttagtgaataaaataggttgaattcagtaagtgctaaggtcatttctaggttcaaatatttttgcaaaatcaggaaggtgcaaaggcaaagcacaagcgtgctaacagcaaatgtgaaaagtatgtcttgcagccaaggcattctatttgtattttgcctgtgtcttagtccattagggctgctacaacaaaataccttaaaatgggtaatttataaataatagaaatgtattgctcattgtttgggaggctgggaagtccaaaagcaaggtgccagcagattgggtgtctggtgggaagccactctctactttacagatagttccttcttgcagcatcctcacatagcggaagtggtaaagaagctctctcaggcctcttatataaaataagcactaatcgcattcttgagggtggaatcctaatgaccaaattacctctgaaaggtcccaacacttaataccattgcattaggggttcagtctcaatgtataaattttgaggggacacaaaaatttagaccacagcagcctgtttatgtcatttcctctgaaccataatcattgctccacccgctaattttactctctctctcctctgccttctcagctatctacaatcaggttgtatagtaactatttatgtgctaatcatctgtgattgtcaccttagggtataatcaagaaaatgatgcataatgttgggaaataatactgcagtttaaatcatatccatattatatttttaagcaaattaagaaatttgaaaccatgtaattagaagcagtatcttcttatctctaaatattcaaagtatggacagtgccaggtacattcacagccattctaatatttgccaaatgaagcaagcctttttcaaatgaaataacgtagttttcacttaaacaatccctagtgtgaaatcaagaaaataatgcataatgttggaaattaatactgaaatctaaattatatcaatattgtatgttttaggtaagttgggaattgtgtgcccatgtaattagcgagttcataaaattatattttaactgcttttccttcaaattgtaggcttttctgagagtttagttgctattgttgttttgtcttcattgttgtttgtgaatttgcaagcacattttaagttttccatttaagaataagttgtatagaaatttaatagacttactacaggtgtccatattacccaagcctctgggctgtttggttctctccaaatagaatgttgagatcaaaatcctttttggtgcttatattagttttctaggactgatgccacaaagtgccacaaactgggtgccttaaacaacagaagtttgtcacctcacagttctggaggccagaaatttgagatcaagatgaccacaagtttcgtttattgctatagacaaaatgtgtcatcccaaaatttgcatgttaaaatcttaacattcaatgtgatgatattaagaagttgggctttgggaggtgattaggtcttgagagtgaagccctcataaatgggattagtgcccttataaaagagaccccagagagttccttctcccctttttgccatgaaaagacacagcaagaaggctgctgtctgtgcaacagtaagcatgccttcaccagacactgaatttactagcagctgtaacttcaacttcccagcctccaaaactgtaagaaataaatttctatagtttgcaagccacccagtttatggtatctttctacagcaacatgaatggactaagacattcctcctgagactaagagaggatctgttccatgcctctctcctggctcctggtttgctgggagcccttagagttccttgatttgtagatgcatcacttcaatctctgcctttgtgttcacatggaattctctctttgtgcatgtctctgggtccagatatcccctttttataaggacagcagccatattggattatagctcaccctgaagggctcgtcctaactacatttgcaatgacctgatttccaaacaaggtcatattttgagatatttgggattagaacttcaacgtaaaaatttttggaagacactattcaacccataacaatgctcatttgttaagataaaaccaaacaaaaaagaacattttaaaacacaaagattatcttcatagccctctacaaactaaaaacatatatatatatatatatatatatatgtaacatataataacatataaaagcataaaaatatatacaggtttctcagacatacacattctcttaatattctgggctctggactaatatatatatatatatatatatatatatatatatatatatatatatatatatatatgagtttttttgagtgcaaagagcttgggtgagcagagtgggaaatgagatgaaagaggtaaaagggtcttggttttaggaggatgggaaaccactgaaggttttccagtaattgaaggttttccagtagacatttgacatcatcggatttgtgtttttttatatatataaatatatatgctgattgcaatgttagaactgataaaagccaggcttaagtgattggcagactgtggtagaagacagctgggagctggcagctggactgtgctgcagtggtggtggtggttgttgataaaaaccatcaccttcagtagctatgtgttgggtaaaatgaacacgatattgtgatgcagtggctgtgggaagagggcaggggaaacaccagggacgattcccactttcttatccacaatgccaagagagaaaacactggatacagaccagttttgtggagaaaaccatgattttatatttgcaaatataacactggagttggatgtggctttgtgagactccagtgcacatagcaagtaggcaattgtatgcttccatctggagctcaagaggaggtcttgatgagacataaattttgaggttgtctatgtacagttgatggaaacctgggtgtgggaaagttgtcaccttcagagagaaaatagaatgaaacaggaagagtggctaaaaataatctttaagacacttcaacatctagcttctaggcagaataacacacttcaaactcaggaagctctggactcaggaaagccaagagaagaggatggctcaggagggaagggggagctgagtgttgctgagaggcccaataagatgagagccaaaggagccagtgaactttgtaatatggagcttcttggtgccctaaaacttactatttggtagaataataggtgggaaagccagaacaaagtaggttgaagagggaccaggaaggacaaaaatggtgaaagcaagaatagggtaaataagcgaaccagctagaaaatataggaggctgtgataagagttggggatgcttgaattagagattttggagctggaaaaaagtgtaataacaatgacatatagtaaagatatacagatgaagatggattaagcagctgaagttaaaaaaagattattaaaaacaataagctacagactgggtgcagtggctcatgcctgtaatcccagcactttgggagtccaaggcatatggatcacctgaggtcaggagtttgagaccagcctagccaacatggtgaaaccccatctctactaaaaatacaaaaattagccaggtgtagtggtgcagggctgtagtcctagctacttggaaggctgaggcaggagaatcacctgaacccaggatggggaggttgcaatgagccaagatcgtgccaccgcactccacccttggtgatagagtgagactctgtctcaaaaagaaagaaaagaaaggccaggcacggtggctcatgcctgtaatccccacactttggaaggctgaggcgggtggatcatgaggtcaagaggtcgagaccatcctggccaacatggtgaaaccccgtctctactaaaaatacaaaaattagctggcgcatgcccagctactcgggaggctgaggcagaagaatcacttgaacccagaggtggaggttgcagtgagccaagattgcaccactgcactccagcctgggcgacacagtgagaaaatgcaatgagatacaaaattagaaatcatattctcagatgagtggcatgcatactctaggatgggcaggtcctcaccagacccaaagactctcaacagtgaggagggggtctgggaggttggagatgacagcaagatggagactgagaggatgatgtgccggatggcatgagcctcacaactgtgacctttatacaagggcttgaggagatcaggcatgactagaaacttaagcctcagttccacccacaaacctggactgctggggatggcagagagaggcagccaccctttgaaaagcctgcagaggaagcagcagcgtggggagtgcagttagtacagagtgggagggaagacttgcaagggagatatttgagagaactcttaagatttttggaatggatttcagaaagcactgtggaggcctggcacattggcacatgcctgtaatcacaacactttgggaggctgaggctggaggatcacttgaggccaggagttcaagaccagcctgggccacactgcaagacctccatctatacataaaatttaaaaattagccaggcatggtagcatgtaactgtagtccctgctactcatgaaactgaggtgggaggatatgtggagcccaggatttcaaggctgcagtgagctatgatcatgccactgaactccaggctggacaacaggccactatcctgtctcgaagaaggaaagaagggagggagggaggaagggagggaaaaagagagagagagagagaagacaagacaagacaagacagtagaaagatttcaagagttgttgggcatcagagaagtacagggctgatgatgggaatagtgatgcatatggtagagaatgaatacctgaatacctgcaggtgtgcgctttcacttcagtattacaccatgaaaatgggattgcaaagcatgtaaacatcagcactggtactgcagatggctggagaatgcatcccactcagctggggtggatgtggtcccaggagtcccaggcaatttggtatgatgtgggtgcttcagtatcagccaggtacagctcacaggatatgtctaaaggagcaactgaatttttcagacagatttgtagacccaattttgtaaatatcactttcatggaaaagtggggagaggtgacacaaagtcaaatcaaatattaattctgtttgaagcgattccaaaatagtcattgtataccacatggttagaatcattaattaatggcttaaattattcattatttttagctgtttttgtattctgtagttatagcctagagctgtactttaacaaaaagcaacaatatttacctatgtgaagtagttatgagtatgaggaggtaattttttaaggtgcttagaaaacaggtttgtaaaatagcagacttttaacaagcaaagaaaatcagtgctgagaaagctagttagtaacatctcattagtaagacttttttcattttataataattaattaggcagccacattaggcaataatgagagctagtaatcacttttttattatggaaattagactggactcattttaaaacaacacttaatgcatatgctgtaatgaatatggaaaagtataagttgcttaagcaaaatgtataagattttgtactcctcccacaaaaataagtgactaaagatgggttgaaaagcagagttacttttctcaacttgtggattgtggaagtacattctctttgtattcttgaaggactgagtttataaggtggactgattttgtattctttgggatagtattattctggacaggatgcatttcattttcttaatcctttgccactagaaatgcaacagaggttattaactcttgttatttgtgcagaatcttggatcacttaaattatttgctgcatatttaagagactcacaactaaatgtagagttttaaacatctactggagtatagattgctctcaagttgtcaatttgatgaatcctaaactgtcctagtcaaattttgcactcctctgaagaccttaaagaggtaacttttgtaagaagcagaatgtataactttaccttctgagaaattagacaattgcaatatgaccttttcaggcatagtggggtgtggcttgaatgcttgaatgtttgttcttaccacttattttccagataagctaacaaatacttagagaaatcaagatgctcaaccagagtcccacacagagaccatacttcagtgatgtttatgctctttgttgctcaaagtcatgccagaatatcttcactgttaatggcactgtaggtccttatcttcattccctaggccttacataccttctatatgcaaatgacatcaaaatttatctctcacaccatcctctttcctgagctgaagacttgtattttcaacttgctatttaatagctcccttcagaaacctcatcagcatctcgatactggcatggcctgacctgcctccaacccccctcatcatcttggtggatgcagcggtgacgcagccagttgctgatgcaaaaaatcccaaaaatcccaggaacctctttccgttctcttactcccacacctcatggagaccctcatgaatcatccagtaggatatactttttttttctttttcttttttttttttttttttttttgagacagtgtcttgctctgtcagccaggctggagtaaagtggtgtgatcttggctcactgcaacctctgcctcctgggctcaagaaattctcctgcctcagcctcccaagtagctgggattacaggcatgcatcaccatgcctggctaatttttttatatttttagtagggaaggggtttcaccatgttggccaggctggtctcaaactcctgacctcaagtgatctgcccgcctcggcctcccaaagtgctgggattacaggcgtgagccaccacgcccggcccaatagagtacactttaacattagaaacgaagtcctatcgttgccaactttaagacctaccctatatctaacttctcaccactatccaaaccacaaacaacctttcacttcctccactgcagtcacttcttggctggtcgttctatttactacatggcagaatattttattttctaaaatacaaatccagtctccccactgctcacaattctctggcatcttcttatcactcttaggatgaaactgtgactcctccccagtcttacccatgactcctctgctttgcccagacatccagccacacaggtgaatgtactgacagcttccaagctcttacctttgccccttgtgatggttaatattgagtgtcaacttgattggattgaagtatgcaaagtattgcttctgggtgtttctagaagagattaacatttgagtcagtggactgggagcgaaagtctcccagtgtgtgggcaccatctattggctgctagcagggcaagaaaaagcaggcggaaggaggtggaaggtgttgacttgctgagtcttctggtcttcatctttctcccatgctggatgcttcctgcccttgaacatcagattccaagttcttcagcttttgcactcttggacttacatcagcagtttgccaggctctcgggcctttagccacaaaccgaaggctgttctgtcggctttcctacttttgaagtctgggactgggactgagccactattggcttccttgctcctcagcttgcagaaagcctattgtgggacttcaccttgtgattgtgtgagtcaatactccttaataaactctttttcatatatacatatatcctattagttctgtccctctagagaaccctgacctactatacccttatttctgcctagaaggttctttccccaaatctttagttgtcatgtctgtttatcattcagcttcccgcttaaatgtcacctactaggaagagccttcctcaactgtcctgtgtcagaaagtccaccacccaccccagcacccctccagccctgctcactttcttcaacatatatatcactatccgaaagtattgattcatttccctatttattttctgtctttctttccaaaatgtgggcaggaggagcttggctttgcttactactgtctccttaatgcctgcatagaggaacagagttcagtaagtatttgtcgaatgaagaatagtgatacacttcttcctataatttgatttttaacctctggagattatcaattggctcacctccctgctaaaaggaaacctgatttattgtaataaccctacgttctctacgctactctatccccaaaactctgctaatcatattatttccatgttgttataattaatgttacttttatcccattttataacttgaatttcacagttgtttagatgctattctatgtttgcatggattcaatattcgccatcatttctctactgtgtcttccttatccatctcatggttgactgtagtttactatttaataactttttaaagaaatgctcgtgagagttaaagtccgagaacacttgtttgttgggtaatataaaccctccacctatgtggcagtttttatgggcatggtcattattggatcataacttccacctctgagcattttgcagacgttccacatctcctaggactgatctctggatacccacagaaatatttgctcttctttttcgataaatttcctgtaatattctcatttttaccaaagcctacaagtattccttggaagtttctactttcagcaaattcagttctctcttgtaaagttacttttctattacattattatttttaaaatgtcatctgttatttctagttgcacgttttgtctttcattatttttgtctctttactaatattaatcaactttttgtccttttccattttattttgttcatttttttctcatttgtcctagatgcctctgatgacattttcagtaaagccagtttctcctcttgctgattttcatttctgtgttgattttttcccttccatttctttccaaaatctatcagttcacttttcaactacctccattgtcctataatatcttacctgggagcttctagaccttctttgggctcctgttacttacatgacatatagtcatacattttatctgatttgtcatacctcttgtttgatatatatagtctttctctggccttctgtttgctgtctctctctctctttttttttttttttttcatttaggtagtatctttgcataggtctcatgctttctttttggtatttactcatcactgaataagggaactaattcggttatgaagataaaaaccagctatttgcactaggagagtataaggaagggacaaggatagtaacccaggacaatgcaacacagtttgcactgtactctgatgtcttcagcatactcatgcatcctctgccccagacataaatgtgccctcagctagcaggaaaactccctgtgaagctgtgagatgcccattgtgggtttcctctgtactcattgagctcttacttctcttcagttggcaaaaagaggtaacttcaggaacatgcgccatacacatgttcttctctacgtggccacatggacaagtcaggcttcagcgaaaggacacggatgtcatttcctcatcaagtctcctcttccccactgctccgtgttgcctgccattccgggcatagagcggcttggcccagaaaccacacaaatgggccttgttgttccaaggtgggtctcctagtgtttcccctaagggcaccacctaattagaagcattctttgcttggtcagctctgcctaagttctacaggggatgtggtcctctctctgtgccccttcacctgcagccttgctctcagaatctttctccacgtattatagtatattattcaggcatttccaaataaagacagagtttcttttttaataacaactttatgaagatacaattcaccactgttaattataccatttaatgctgttagtatagtcacggtgttgtgcaactatcaccacaatcaattttagaatcgtttcagtaaccgaaaagaaaccccatacccatgaataaccattttctatctccgccaacttctcagccctaagcaaccactttctgtatctatggatttacctatcttagactttgcatataaatggaatcattgcaatatgtggcattttgtgtcttgcttctttcacttagcataatgtttttgaagtcaatccacgttgtagtgtgtgtgtgtgtgtgtatatatatatatcttagtacttcattccttttattgctgaataatatatctcattgtatgactatgccacgttttatttataatttatcaactgaaggacaattgagtttacatttttgcctgttattaataatgcttctatgaccattcatctacaagtatttctgtagatatatgcttttaattttcttcatatatattgatgagttgaattgctgggctatattgtaacagtatgtgtagcctttgaggaactgccagactgtttttcaaagcagctgcaccattttacatccccatcaacagtgtataaaggtttccatttcctcatattcttggcaacatatgttattgtccatcttttttattatggccatcctactccaggtgaagtaataattcagggttttgatgttaatttccctgatgactaatgatgggcatcttttcatgtgtttatcggccatttgtttatcttacttggagcaagtcttattttgattttttgcccacattttaattgaattattaatcttctttattaatgagttgtaagagttatttacatattctggttttatcaggtatatggttttcaaaaaatttatcatctgtgtgttgtctttttacattattaacagtatcttttgacgcccaaatattttaattttgataatattcaatttatttattttcttactttgttgcttgtgcttaagtatcatatctaagaaaccatttctaattcaaagacatgaagacttactacacctatgttttcatctaagaatttaatagttttagcagttatgttcatgtctttaatccacttgaattaattttgtatatggtgtgagataggggtcaaactttatacttttgcatgtgtataccaggtgtagcagcttcatttattgaaaaatactgctttttccccattgaattgtttggcactctggctgaaaatcagttgaccataactctgagagtatatttctatttaattgatctatatatctatttttatgccaataccacactgccttgattactatagctttgcagtttttgaaattggaaagtgtgagtcctccaactgtgtttttctattttaagatgcttttggctgttctgagtcccttgaattttcacatgaaatttaagatcagcttgtcaatttctacaaagaaatcaggtggggatttaatacaggttgcattaaatcagacctcaagttagggagaagtcccatataaacaatattaagtcttttgatctatgaatatgtgatgtgttttcattcattcagatttttgctttctttcaacaatgtttgacagtttttaaagtataggtttgtgccctttttgctatatttagtcctcagtattttattatctttgatgctgttgtaaatggaattttctcttagttttatatttagattatttattgcaagtgtatacaaataaaattggttattctatatggatcttttattctgcaactttgctaatttttagttataatagtttttagtggattccttatgatgttttatatacaagatcctgttatctttagataaataattttaattcttcttttataatctggatgtatttaatttatttttcttgcctaattgccatgactagaacctcctataaaattttaaattgaagtgataagcacatacatccttgtcttgttcctgattttagggggaaggtattcagtctttcaccattaagtatgatattagctgtggttattttctaggtgtccttcaccaggatgaagacatttccttctatttctaacttgttgagtgtttctatcattaaagggtgttgaatttagtcaaatgctttttctgtatttattgagatgttcatatggttttagttctattccatgaatatggtatattagagtcaccggttttcagatgttaaaccaatcttatacattcattttattcatgagatatgatccttttcatatattcctgggtttgatttgctagcatttcattgaagttttttataccacaattcataagagatttcagtatgatttttttctggtgatgtctttttctcgtttcagcatgagggtaataatagcctcatagaatgaatagggatacctccttttctatgttacgagtttgttttgcagaaatcaccagtgaagcttgtacttttctttatgggtagttttttttttaaaaacaattaattcaatcttatttgttaaaggccgttaatatattctatttctttctgggtcagttttggtagtttgtatttttttaggaatttgtcctttgcatcttgtttaatttgttggcatatattagttcatagtttcccttatcatcttttttatttctgtaaagttcgtagtaataccccatatttcatttttgattttagtagtttgagtcttttccattttgttttcttggtgagtctagttcacagtttgtccattttattgatcttttcaaagaattagttttgattatgttaactatctctgttattttctataatttattttgtatatctccactctagcttttattattttcttccctattcttgcctagcatttagtttgctcctctttttttaatgacttcagatgctgtttgcatgacatgtgtttttccatcctgtcactttcaatctatctggtttctttgaatctaaagtgtatctcctgtaaacagcaaatagttgaatcttgttttttattttatccagtctcacaatttctgccttttaattagattgtttaatctattcacttttaatgtttttattgacatatttgtacttatatttgccattttactttttgtttcctatgtctcatgtcttttgtttctcaattgttttattactgctttcactgcattaactaaatattttctcctgtttgtcttttcatttctaattttatttgtcagctttcgttggtttcaggtgttcaggtggtaaggagaagcagagaagacattgctcttccattttaaattagaagttatctgtctaaggtcttcaagggcaaatatttcataatacttttctacccccatagtagatatgtgtgaggttcatcacaaatcctcctctcccaaacatcttttcagtttggttcagtgactgagtcattaggtgctagtaaagaaatctgggttttaattctagctctgttattaactagttgaatgatcatggaatattcatataacctctcttggacttattttctgacatataaaatgagagggttgaatttgattttatttaatttcccttttagcactgatatgctaaatttccagtaatactgtgatcatatggatctaaatacataagcacataagccaggcagagttaggcattttgcttcttgcaataggcaatcttatctacaactgattttgaagcataggatttaactagatccacaatatagtaaaataattatttggcccaaactactcactggccagtagcccacagattatccccttatgtgtaagagaccatgatttgagaatagaaggaaatacagactttgaagtgattacaaatataagctagtccaagatgcctcatgagaataaaagctttatgtggagtcctatatctatgtccaataatttgtttaaaggtattttgttagcaaatccattatccattgactgtctacagtgtgcatacctctcaagagtggcttatgtactataacaaaaacacaggagacccgctctaattggcctcattttaaaatgaaagggagaataaacacagtggcacctttaattattaatgacaattgaaggaagccttagcacaaataatcccaaagacatttctatttggcttggaattttaatattgtttttgacagatctatttacctaattatattttatctaggatagtgtttaaatgaggttctgtttgctaagcacttaccaacagagcagtagaagacatggctacaaagtgtattgcttatagcaggaagctggtccaggatttattaaaaaaaaaaaacataaaacatgttttgtgaattatccataacaaggaataccctcatgcagataatcaacaattgaatacgcataaaacacagatgacaaaaaaacaaggaagcttctctataaccaagcacagctgggcaaggatgcacagagatgctgcaggggattcatggggtgactggagtcgagacaattagtctgtaaaagcttcgtgctgatgccctcctgcagcacatttccttaacatctttaaaaatgcaccagtccagctgtttcatggagcatctcaggcttttaagacctccgtttttttgtctcattcattctctttattaccattaacaaagagtgggtcttagacagctgaatgttctacttacttaatgatcaagatcgtggagatagtttcaataatctaatggataaagaatccagaaatatcttaaagtttgtgttttcaggcttattctctgagtgtcagtccctctcaactagttcttacttagtcccaccctgataccatgctgtcaaattacttgctattaacttacaaatcacattctcctgttataattctcgttgagggaacatcagtgtcccccctaatttcacctacatggttacctttgtaaaaaaaactatctgagacacctgtgcttattcatgatactgtattatattgaatggttttagactttagtcttcctttagaaaaaattctcaacttaactttgtttcatgaatacctgtttacttctatatgttgcattttagattcccttcagaccaactaaatatgttcttattgaccatcaatgaaaaaaaaaggtatctaaaaatgggaagtatttaagacttgtactcagtcaaaccctacgtttgagggtttttaagctgtttgataacaaccatcctctgccagcatccccccaatatgtttcataaaatattacttacatggaattttaacagatattttgtcaaaataagttttagaaacacaaagtaaaataatttttttttacactttaggactcttggagctctggatagtataatgtgccttatgaatcttgaatagaggaatgtaatgtaatgcaatctcccaacatttttaatgcatatccattctgagaaatatcttttgtgtgatgttccagcataaattactaaaggtgaagagatacatatttgagctataaagactagatctttttttcctactttcattcccaaataatacaaaaactattcatcaaaatgttaacactaaaacaaatagattaaaaatttcaacataaactgaagaatatggtaatgacaccaagaagttatttaaatcttcagtatcaataattacccttcaaataacactatgttgctactctgagtacttttatattcgtgtctctatcgtggtaatacagccgtaacttgtcttcccacttagaccgaagaaaattaaactaaaaatgcgttagtagggcatatagataatgaataatgtgctcctttagaaaatattaaccatacttctgccaaatacattgttgtcacagtgcacggagaacttcatttcacaaggctttttgcaagattgatggtgtaacttgagtaggtttggcaaaaggagcatgcaaatttcagcaatataattacatcattttcccttatggataccacccaaccgagaaatagatccaatagtcagatgagaaattaaatacagtaccagctttattagtaggtcaattagcatagttttggctacaaggaacaaaaatcaccaaataaaactgacttaaaagtagggtaatttctcatctcaaataaaaagctgttcagaggtaagtttactccaggatgtcagggctctagagatacaactcagtgattctctgggtttttgtcctgtacgtaatggcttcatccttgcactggaagtgagatggctgtgttagctacagatgtaacatctagacatataaacattcagaggaaaaacagaaactccactcttacttaggagtaagaaaaccaaacctttccagtaaggctttcatgaatttccctctcattttattggctagaattgggtcacacactcattcctaaatcctgacaagggaaatggatttaccatgattgatttagacaaatcagactatcctggatgtagggataaaggtatcctctcttcagctactttagaggagtcgattttgggggaaggaaaaaggagagcagagaatgaacactgaacatagtaactgagagtgttcacactattacccagcacacagggtctctgatgaagtctaaccgtgttttcctccttgtttccctccatattgaatttatccaactagatcgcaggcaaagaagatggatgatggtaagcttgctgaagctcaccttctctcacctgcctacacatgcaaaagcagccagtgtaaaaccccaggccttcccataacccatgtgctacacagcaagagaaagaaggagagtttcaggcatgaaaataataagagaattctgcccttatctcagcagttctgtgagtcacttctcctcagggaagagcaattagaaggatagaaagaatggtagacatttacttcccagaatatattagcagagtttcctttttcttggtggaaactccaggaggaaagatgaagtttttctttttgggtaaaagatgaggtgaggggtagaggggaaagcacactagttttaggtgccatcaataatcctgtaggcattcatcctgcaatcatgtagtaaatcataacatttgtcatgcagggaggtaggtactggatgagcattgggaagaagacgtggtcccagctatggaactccaaattctgtgtctccaatgtgatatgggaagtaattataatatgtaagctatttgttatgtctacaaagcattgtaaaaatgtatattaaatttaaaaaaaaggcaagaaatctttttcctgttcagtagttccaaaaagactttaccaaataaatgaaattagtgcagaatttaggaagatgtatagattgtcattagtcaggctacaggaaggaaatcatttcaggcaaagacaagatcctgagtgaaggcccagatgcatgagagcagaaattgtcttccagaagctatgggtaaacctctatggttcaaatatggtgtctagagtgagacacattgctaaggcagaaaatcagcctgaaaggaagattgggtcaagttatcaagtttttttcacaccactcaatattatagttgaggcagaatactattttcctctctccttcctgatctttgccgttaaatctttcagtggaaattatacacagtatgatatatgcagtaagggaaatacttaacaggcctctgtcatgggcatttgtggatgagtacaaaagaaatagaagatacaaattcttcacacaataaatatatagtatgtgtcaaaattaaataagataataatataagacaatgaggcaatagtgccattgcttgtggcaatttttaaactccattttttgagccagtagtgccaaattttgtctatactcccaagtgtcagattcaatcattctgtcatcacatatttattatatgctgtgtgctggataaaaatcttcatcgttgagggaagatttgatttggggatccctcccaaagttatttgtatcaaagtcagctgaataaggtggctgatcatgataaggaatgccattatagactaagacccaactgcaaggaggaaatgagattttttttttgacctgtacactgtgaagcataaaataagaaccataaacttaaggccatttaaaaagagaattatagaaaagcattttaagcaaaggcagctcactttaaaaaaaaaaaagtgactaacttcccacaaagactcctttgaaggacacgcctcatttgggtgtatagatctccctacgtttgttgccatgagccttagtctatcatcatcatacctcaacttagcaagttctatagcatatggaggagacaaaattgcttcagccatttagacaagactgaaatcattgtgggcttccgtgattggaaaaggtctttaaaaagctttgaacccagcatggaccttcactgcaaatacagtcatgtgctgcataatgatgtttcataatgatggaccaataaatggtagtatcaaaatattataatgccatattactactgtactttttctatgtttagatatacacatagttactattttaccattgtgtcacatttgcctgcagtattcagtacagtaacatactgtacaggtttgcagcctagaagcaatgggctgtaccagatagcctaggtgagtagtaggctatcccatctaggtttgtgtaagtatgctctatgatggtcatacaatgacaacatcaactaacaacacatatctcagaacatatccccattgggaagtgacaaagtgactctactggaaaacaaaatatttcgtacaaagcctgggatgtgtgctctgtttattatcacctcaaagaagacttacaaattgggagaactaagatttgtaagagttctcaaacatagagagaatattatgtatcattattatatatcatgcatacattcgtgtatatttacttcttagaaacgtgtatcatgtatatgcatgttaaataggtatgtagtctttggcaacttctatgaagttttttttttttttttaatttttttttttttttattgatcattcttgggtgtttttcgcagagggggatttggcagggtcataggacaatagtggagggaaggtcggcagataaacaagtgaacaaaggtctctggttttcctaggcagagcaccctgcggccttccgcagtgtttgtgtccctgggtacttgagattagggagtggtgatgattcttaacgagcatgctgccttcaagcatctgtttaacaaagcacatcttgcaccgcccttaatccatttaaccctgagtggacacagcatatgtttcagagagcacagggttgggggtaaggtcaccaatcaacaggatcccaagacagaagaatttatcttagtacagaacaaaatgaaaagtctcccatgtctacttctttctacacagacacggcaaccatccgatttctcaatcttttccccacccttcccccctttccattccacaaaaccgccattgtcatcatggcctgttctcaatgacctgctgggcacacctcccagacggggggggcggccgggcagaggggctcctcacttcccagtaggggcagccgggcagaggcgcccctcacctcctggacggggcggctggccgggcggggggctgacacccccacctccctcccggacggggtggctgccgggcggagacgctcctcacttcccggacagggtggctgccgggcggaggggctcctcacttctcagacggggcagttgccgggcggagggtctcctcacttctcagacggggcggccgggcagagacgctcctcacctcccagacggggtcgcggccgggcagaggcgctcctcacatcccagacggggcggcggggcagaggtgctccccacatctcagacgatgggcggccgggaagagacgctcctcacttcccagatgggatggcggccgggcagagacgctcctcactttccagactgggcagccaggcagaggggctcctcacatcccagacgatgggcggccaggcagagacactcctcacctcccagacggggtggcggccgggcagaggctgcaatctcggcactttgggaggccaaggcaggcggctgggaggtggaagttgtagcgagccgagatcaggccactgcactccagcctgggcaccattgagcactgagtgaaccagactccgtctgcaatcctggcacctcgggaggccgaggctggcggatcactcgcggttacgagctggagaccagcccggccaacacagcgaaaccccgtctccaccaaaaaagtacgaaaaccagtcaggcgtggcggcgcgcacctgcaatcgcaggcactcggcaggctgaggcaggagaatcaggcagggaggttgcagtgagccgagatggcagcagtacagtccagcttccgctcggcatcagagggagactgtggaaaggggagagggagagggagggggagggggagagggagagggagagggagagggagagggagagctctatgaagttttatcaacctgcacttttaaggtaacgtgtaggttaattttcacttctcaaaaccctcacttcagatagaaaaaataacttcggaaacagcaataataatagtaataattataataaatagtctaaataattgaaatgaaacctaataaacagacaaaggaaatgatacaaatggaataataatgaacaagagaaaaatttacgattgtgaaaattagattgtaaaatggctttagaggaaaagtactgtaattcacattcctacagttatttgagagaaagggaccaaaccagtttaaaaatgtttttactgagaatttaaaaacaccctttagaaatagaaattcagtttctgactttatttagcaaaaattaaccagcaaaaaccttatgccccccaaaatgtgacctctttctctgtggatagtccagtgtttttcagcctagagcctaattctgctcttgggggacagggtccatgaagcgcaaccctgtgttttgtattcatagaaatgcagccagcaaacttgggtattggatgaactgggcattgtgggtcactctgcccgtggacctgctggtggcaccgcagggaaaaggttagaaactgcatgttctctgccaggcagaggctctactcatgttcttctagggagtcttgccttgtcatttctaccagtcatagactgggagatttgctgaccttagagatagtaatatatttcaaacctcaagaggcaagaatgatatgaaacaaaggatatccctggatttcctctggggctgcgaaagggagtctccacctggctctggaaggctatgtcttgtttccatccactccatttaactcccacttcttggcctgctttgagactgtcagctgggggccaattactgccatttagagaagtggatgctttaatgtgaatacttgtctgcaggaaccacacagagacagctgccttatctcacaagaaccctgtgttgtttatactcagtaatctgccacagagctctctccacaatggggaaacgaatccaatttattctccctattgcctgcacttaatttctttgactcgtttacatgtctgtctttttaagttgaagaaagaatacgaatgtaagttcctctgtggctaagagcatctttgactgtgttcttaacagtctaagacaatggagcaatagtactattgcctgaggcaacccttctgagtttttcaatttattaccaaatttttagatgaattatgatctagtctagttccagatggtgcatctagatctttataaataccagaagcacttacttgaaaagctgccagatctataaagggatctactactatgacttggagttttttcatacattattgtctgttttcataaattgataattaataggttctctaaaagccaagctgttcatggtttaaaaacagctgttagccatgaaaactgtggtgacatctacttaccaaggtatttccagagagacatgtagaatcacactggaaattctgtaccactccctggtgctcttctgggcagggagagtttactccacaatgccacaaaatcttatcagattactctccttttgaaaccttccaaagacttcacactccatctaagataaaactcagaggccctgagcatgaccttcaaggtgctcacccactctcttgcttcagtttttgtttttttgtttgtttgttttatttttagacagggtctcactttgtcacccagactggagtacagtggtgcgatctcggctcactgcaacctctgcctcccaggctcaagtgattctcctgcctcagcctcccgaatagctggggttataggcatgcaccatgacacctggctaatttttgtatttttagtagagatggcgtttcaccatgttggccaggctggtctcaaactcctgacctcaaatgatccacccagcttatcttcccacagtgctgggattacaggcatgagccacccagcccagccctgcttcagtttttaacctcaccacctcccacaccaagctatgtccacagttgcctttttctctgttcttagaaccctacattgatgagcatcagggcacttgtctcacctcataatccagttatcctctgaggcagaatagaaatccagacctggaatctcctcttgtttctgctttccaacagcttcctctcaatcaaaatgacaaatgattcaatatcatttttttttttttgagacggagcctgagttttgttgcccaggctagagtgcaatggtgtgatcttggctcactgcaacctccaccacccaggttcaagcgattctcctgcctcagccttctgagtagctgggattaccagcctggcctcgaactcctcacctcaggtcatctgccctcccaaagtgctgggattataggtgtgagccacaatgccaagcccagtatcattcttgattaattagttgcaacttaaaggagtgaattttctaaatataagattatatcatctaaaaacaaggataatttgatttctccccttccaatttggatgagctttatttctttatcttgtctgactgctctgactaggactttaagtaccatgttgaataaaagtggagaaagtgggcatccttgtcttgttccagatcttagaggaaaggcattcagtttttccctgctcagtatgacattacctatgggtttgtcagatacagcctttattgtgttgagctatgttcttttgtaccctattggttgagagttttttatcatgaaggaatgctgggttttatcaaatgctttttctagcctctattaaaatgatgatatggtttttgtccttcattctattgatgtgatgtatcacttttactgatttgcatttgttgagccatccttgcatccctgggatgaatccacttgatcgggatgactgatctttttaatgtgttgttgcatttgatttgctagtattttcttgagaatcaaatcaaaatggattgagggcttcaatgtaagacctgaaactatgaaactagtaaaagaaaacattgggggaaatgcttcaggacattggtctggacaaaggtttcttgagtaagaccttaaaagcacaagaaaccaaagcaaaaatggagaagtaggattacatcaagctaaaaatctccacacagcaagggagacaatcaacaaagtgaagtgacaacttacagaatgggagaaaatatttgcaaactattcagctgagaaggattagtaaccagaacatataaagaacacaactcaatagcaaaaagcaactaataattgtatttaaaagtagggaaaatagctgagtagacatttttcacatacatatgcccaacaggtatgtgaaaaaatgctcaacatcactaataatcagagcaagacaaataaaaaaccataataagtatcatctcacccaagttaaaatggcttttatcaaaaagataaaataataacagatggtagtgaggatgcagagaaaggggaacacttgcccactggtggtgggaatgtgaattagtatagtcattatggaaaacagcataaaggtttctcagaaaactaaaaatagagctattaatactatatgatccagtaatcccactgctgaatatatataaaaaagaatgaaaatcagtatttcaaaaaggtatctgcactcccaggtttattgcagcactatttgcagtagccaagatgtggaagcagccttagtgtctacctacatatgaatggataaagaaaatgtggtacatatacaaaatggaatattattcaaccataaaaagaatgaaattctgtcatttacaacaatatggttggaactggaggtcattatattaagtgaaataagccaggcaccaaaaggcaaatattgcatattctcactcatgagtgggagctaaaacaattgatctcatggaggtagagagtagaatgatggttaccagactttaggaagggtagtggggaaggaggaataaagaggtgatggttaatgagtacaaaactacagttaggtagaaggaatgagatgtagtgtttggtagcacaatagggtgactatagttaacaataatttattgtatatttcaaaataacttgaagagtgggattgaaatgttcctaacacaaattatatatggctgggcattgtggctcaagcctgtaatcctagcactttgggaggctcaggtgggagaatcgcttgaacccaggagtttgagaccatagtgggcaccataatgagacccctatctctacaaaagaataaaaagttttaaaaaattagcttggcatgagggtgtatgcctgtggtcccagctacttgagaggctgagctgggaggatcacctgaacccaggagattgaggcttcagtgagccatggttacttcactgtactcgagcctggatgacagagcaggtccttgactcaaaaaaaaaaaaaaaaaaaaaaacgaaaacaaaaaaaagaagaggaggaaatgatatatgtttaagaacatggagatccccattaacctgatttttatcattacaccttgcatgctgtatcaaaatattgcatgtgtcccatatatatgttcaaatattatgtacccatagaaattaaaaataaaaaaaattaaagctaaattttaagttttcactgtgttctcagagcacgtagtcattctatccatctatccacccatccatcaatcgagtgcctagtacgtaaccttaaagtgattatatttcttagtaagcacctgctgtatactaaaggtaaaagttattggtctctgtgcatatgtggttgagtttagcagataaggcagaccaacaaacaaatcactatatgatgggggaatagatcaggttttctagaaacatgagtgagagcttctaatatgccctagttggtgatgtgagcgtcaggacagtttttctaagagttgttttgagttaagcattaaatcatgaataaaagatagtttgggttgccagatatttatcaggctttcattgatgcccccttaacatttgccagtcatatgggaagtactcaaaaaatgtttgagattcattctttagtgatatgttcactttcttttttaaaaaaaaaaaataaaaagtagtttgagacttctgtgattctctgtaaataaattttgacttgacatgtctgggaccttggcactgactctcctgggatacctcaattcccctcctttcccctttcctctctctatatatactatatatatgaagtcccattgtcctggcctctccatatggcctctttctgtaggatactggatgatattctgtacctctttgcaatttgttagctgagagccaggaaagtgaaagcaggaactgctgggacccataacatcgaggcccggaaagggcagcgtcacttctatagcattataatgatcaaagaaagtcacaggccagccaagattctggggaggagaaatcaattccatctctcatgtatgtagtggaaaagggattgctggtggctatctttggcaactatctactgcattccctcctcctcaaattaccttattctttctatcctcccaaagactaccatatgtatatttgcactcattctctagatttgacataaattggttgacactaatgacacttccctgtgtctaacccttgtccccatcatccaattctttctgcccttacctggcatctgtaattaatttctttgcctccaatgttacttctctgtttggtagtgcaattgaagaccacataaaaatgctgctagaatgcatctcctttgttagcagatttagtattctaatgtgaaattccttctcatcctttaaaacccagttaaatctgacttctataaagtccttattgactatcccaaagaagaggggatttctctttctaaaatttgtagtaatgtgtttctggaatgtattctagttttgactatggttaggaatacacatgctttacctttctaataattttgaaaactcaaaggcaggcagtaggatatactcattttttaaattttctaaagcaccaagatgagcccattacatagaataagttgagtttttgttgagttgtcagggatctgggaagaatggtttggcttttaggagaggttctcagccaaccaggaaggaaaaaaaaaatgattcagtgattagtgacaacagctttacttctagaatcctcccacctactactggcagcacgagcaggcagcttgccttcctgggacgaacctagatgaggtacaatgtggctggaaagctctctaatactgatctgacatggcatatttcagattaatctgttttctctccttgtttccagtttcagcacatactaatgccatcttgaatcttacttttcctccctggccctcagcttccccatctgtaaataacaaaggctactatttactaagaacctgcatcagtgccagacacagtgctgggcactagtgctaatcctcacaataatagtgaaaggtgcattttttttatttcctccttttaaatgaatatcagatatggaaaggaaaacaacttgcccaagccctctcagcacaactggattgaaactcatcccccatgagtagcatcagggtcaggccagataagctgtaaattcccttagcctttactatgcatctccaccaggatgtaaaatacaatctgctgtttgtcttccaccttctcctagaccagcttttctgcgtcattatttttcttttttgtcttcagctgcagtttctcttatcagttattggctccacaactagcaagtttattttttgctccatattgtattctggtgtgttatgctacaatttgtatagggaatgagacacaatatggtttgctaatgagaaaatctacactgcagagacagaacctatttgttctcagttacttgaaacgtatgttagaatgtagaatctcttcttcattcccgtgtgaggtgctgaggaaggctggaggggttctgattcagtcacatttgattttggagtcaaggtcttggcttcaactcatattgagttttactggaaactgccagctttgttttgggtagacatttgtaaatgtgacagaacagatgactcatctcaagccagctctatgcttttattcaatgtgtgcttaaaaagagtaaacgtggatgttggaaagtattttcttgtaagtactttgtatggcagatgccaagtactgctaaacctaattatttaattcttcttcttaaatagatattatttagttttaatttttaaaaaccttcaactatataattgatatatatcatatatatagatatagatatatatcaataatataattttactttttagcacaccagaagcatattattttggaagatcataggactcagagctctggataggcaaagtagacttggatttacattctctgtgatcttaagaaatctactttctcccttattttcacttttctgtactaaaaaaaacagctgtactaacatgaataatatgtacctcacagggttcatgttgaggacaaaattattaatagataatatgtcaaagagcttgccatataatcagtaggttctttcctgccatggaaaaatttttttagtcagaataggtctcagccaacctctttcatgttccagaatttaatgcatacttgctgattcaatacaggtagaaagtttaatattaatttttattttgttggctttctaaaaaagcagtcttttcacattagaataagtgaatgaaagagatcactaaaatcaaaagttgttacaaatgttattttgattgctatgatttcaaatgcagttttatcttcttataaagttaaaatacccaatttcgtttttaatttatttggaaacaacaacacgactggttgaatactctgtctaaagtaatctctaacaaagaatgactgaagttctactctaccaatgaaaagcaagaaccggggttcctcctttctctttctgtggtatgggagctacatgaaggcagaataaaagagtcagactaggctgggaatcctgttcaagagaggcactcagttacagtgtacatgtcagaattgattgataaagttactaggaagtaggcatgtaaccttagttagtcttgttctccagttttcaataaaatgtggactatacctttgggggttgtgttcatttgtttgtttttaagacagagtcttgctctgtcacccaggctggagtgaagtggcacaatctcagctcactgcaacctccacctcctgggttcaagcaattctcctgcctcagcctcccaagtagctgggactataggcacgtgcaaccacgctcagctgattttttgtatttttagtggagacgcagagtttcaccaagttgcccaggctggtctcgaactcctgagctcaggcaatccacccatctaggcctcacaaagtgctaggattacaggcatgagccaccatgcccagcctactacagtatttttaaagaagagcagtttcacagtgtcaccaaatcatggctttcagatccagagttacaaattgcctcccaactcagcagttcttgaaaatataatattaccgatgtttggctcatgaagactccctagaagcccagtgtcccctagggaggaagtgccaaattgaaaatttttaaataatcgttactgtattttatagcaaataagtatatgattatcaaatatgcttaaaccctttgggaaagaggagcttgaaaacactgtatccatcctttgacagatccatttagcctaattattcaatgatccccatacattttactcgcattcttgacccaaataattcagattatatttgtatgctttttgatatccttaatgtaaaaaaaattcttgattctttttctcattcattcaacaaatacttgttgagtgaagaccatattctccatgagcaaataagtagaagaatctccatgtgggtcctgcattctaatggggaaagagaggctgataaatactaaacgcaagaacattaagtaggtactatgtcagtaaacaaagtatagagtagattagaaggaaaaaaatcaaataatagcaatgttaggggcgaaggagcctggagttgtgaggatggcttataattttaaatagagttgtgggaattggcctcaggaaggaggtgacatttatgagagagttggaagaggtgcagggattcaccatgtgactatgtgggggaagaacattcagatagggagagcggccagtccagaggctcaaggcaagtctgtgtctgagatgttccaggaagaggaaggaggccggtgttcaggagtaaactttgtaacttagtctttcttttctcacattagactttttcgttgttgatgttttactttaaggaaatttatttttgcaaaaatatgtactatttggtttgttaaaataacatctaactcttgaaagatcatttaccttgatagaggcattcatctattctgttaggaagaagcacaggtcagccggagatgtttacagtacagagttcttatataagtaggaaaaaaaaaactgtaataatttaaaaagtaaaaaaaaaaaaagtcaatacaggacctgccccttcctagacaatcacaacgtgtccactcattctactttcagctgccccctccccaccctatccgttcaatatcctgccactctggcaccatcccagccacaaggcctcaggtcctctctctgctctcgctggttttcagagaggcgctcctcagagagagtttctagcactaaaggataagtgattgttatgacaatatacttctttttaaaaaatgcttgtttcatcggagaattttggctggctatgggtaatggaagagatttcacataaaagttgagtccccttctcacaaagcaaatgagcacatgatggatcaaggtgctctgctggtgtagactaacatatattaataatacacacatacctattaagagatctgtgtcaaggaatatacatgtagtatatattaaagacatcagaatataagacaataaattaaattaccttatagtcacctggcttctatggagcaaggagaatttaattaaaccacagaatctgagagaacatttgatccttggttgatgctaaaaaattgtttcactatttgaaaatagtttcaaatcatttcactatttgaaaaaaaaaaaaagcaagttcagatgggagatggactcatagcttatactatgtcgaaatgcattaggaaagattagtttaagatttcatgccaataaaataactttaccaaaaactacctttatggagtactagtctcaccaggggaagttcaaaacatcacattttttaccaggaagttgatgcattcccttggcaagtcaatgggatggtttatgcctagaatctcagagaagaagaaagcctttttagatgaaaaagatagtcatatgtctccaaaccctcatgtgtatttatgtagtggagaggaaactaattgaagcagaaggtagctagatttttaaatgtaatcattaatagtctcacagttgtgttgatagcatccaacagggttaccttctgggcagaaacacagatcactcctactgttcttggagaaagaaaaaggaggaaatgaacacatgctcactgaacctcctagcaaaaaaagtctctctagaaatatatggtccactcccaagctcaccctttaattctccaatgttacttctgtaaaatagcagtcctgtgatattactcactgaacagatgaaattaaaatatttatattctgcacatgcacgcacggaggaaaatctcacttcaattatagcagttaagaagtctgaagtaattttcccagctagcatttggccattccattgagattgaaggaatctggtatgatgatggttcttattaattcaccctctcttcgttttaaaagaatattatagttcctttgtgatgtaaattgtttgggcaatatgatggtgcactgccttgtgactaaaaagtcgacaagctcaaaggacaaagtattcaggaacaatagctaacatttactgttcggcactttttaaatgttctcggtaagataatttttatttctgattcacttttctttttgcctttccaaaagggatttaagttaattactttttctaatgtgactttgatatttcagtcccctcagatcttccaaggaatttacaggtgaaataccattctagttcttttattttcctagaaactctgatattaaatatgggtgtcacactggaaaattccaccagaataaaaagctaaacaaggcataaaatttacattagtaacatcccattaaaccatcatctagaaagcttttgttacatgattttcatcatttattaaattattttggtgtcttttctggtcttttttgcctgtaggactgaaccttgttatgcatttgtctccatcaaaatggtgtagctgcatttggcattattccttcaacattcttctttattttttccacagaagatgaaattagcttggtttaataatagtcattcctgattactctctctgtggaaaacagcttaagaggcacattattcaattaaagaaagtatttgcctcgccctttaaaaccttcattttatataacctattgattgtgaatccaattagtcttacatattaaacttttattacttttagtatagcacttttacatgccatcgggaaactcatcaccatgtaaaatgcatgtagttcctgactttcaaacaagaggtatttcagaagatcactgctaagtcagtgtttcaaatttgaatatacatgttcatcctataaatgatctatattcagcctataaatgatgacatgattatatatatagtcgtcctacaaataatcatcctataaacaattattgggttcctggggtaacagcaaagcaaaataattagaacatttttgttaataatatacctagtaataataatgtagctgggaaaataatgaacaaaataatatagctgaaatagtagtcctacgttttagggacaaggttagaaagaagagagcaccaggggttggagggagagagtggttcctcatatacactgtgataactcagatagtctgcagtcaggaaacaattggtaatccattaattagagagtatgatgcccttttatgaagtgatagtgtagacacaatagcaatattaattagctttcctattgcttccataataaattagcacaagcttagtgacttaacccaaacttattatctcacacaattctataggtcataagtctgagttgattctgctggtttctctgttctgggtgttaggaagatgatgtcaagatgattaacagctgggctgtggaaagaatctgcttccagtctcattcagtttgttggcagaatccagttccatgtgaccataggactgaaattcctatttccttgctggctgtcaacagggaaccagcctctagttcttgcatgtgggccccgacatctcagagccagcaaacatggaatccttctcaagcttggaatctctttgactttctcttcttccacatccttcttctgcttcaagccagagaacactctctacttttaagggttcatatgattcaatatgtcccacccagacaatcatctctctattttaaggtctgtaaccacaatttcgtgtgcaatgtccattttgccaccatggaatacaacatattcacatattccagggatccaggtgtggacatttttaaagggccattatgctgcttatcacaaatgtaacatgttttgagttgttcttcaagggttcaatccacgaatagcttgtatgcacaaaagcacttgtacaaaagatgaccaccagggctccgcgggctgcctgtgtcacagaatcgagtgatgtccactggcctcacagttcagagctcaccagtactctctttcagcagttcttaatcttatttccaaagatacaccccagatatcctttccttgtgtttacatattctcagactctggctgctgtgttaataagtggtgttgagactattgcttaatgtacagtgaaagagttaaagtgattttgtataaaaatgcaacgatctgtttcactaacattgtcccaagcaacagcatgagcagtcgttttttatattactttaacagaatttcccatccacacaggagaagttcatcctctccattttcttaagagtagagagtgtctttagcatctcaaggtttctgtggatcaccaggagccctgccttggagaggctccagtacacaggtgttactgagctggagggcttgagagaggggaccattctgaggatgggggatggagaaagaatgttaccaaggtgaacggaaaggtagcaaagacgggtatgtacgggaaggtctgagattgctgtttggaattgatttttcaattattaattttttcatgtattctgatatgatgaaaaaaatgacagaacacattaatcttatggaaatgtagggtaaaaaagaggatttgagattggaattattctggaaacctggatcttgagctagaattttaaaaataatggagatggttagcctacagttcggtttctgcttgggaactctttttcaaaaattctctggaaattattaaggcaccaactacttgctctgaaaattgataattaaaggggaaaaaactaaatatttattctgactttaaagggagttatatttttcagtaatcaaaataatcacttgatgatgaatagccttttttatggaaatattgcagttcattaatgtgtaagaataaaactcaccattttgcaatgttaataaaataactgatcaaagcaacgttcatcagtgattaaatcctttggataaaatattaaaaagaactagacaatagagggactaggttttcattataactagaatttggaaccctagaacttattttttctcttaagataatgtaacataaagcagactgcaccatctatgaagcatttctgtcaaaagttgaacctaaatctaattgagcctttatcacttacttccagccaccaggaaatagagagggaaggaagcagttaaatgacaccacaatgaaacaaacagagaaatccagaatgaaggacattttataggactactgacacagtttctgccaaaagttaatgacatgggaaaaaaggagaggggaagaaggaggagcacagctgtaaatttaaaaaagaaagaaagaaaaatgacttgggagatttaccaaatacagtatttgaatcttaattcgagcatatcaactaagaaaaagacatttttgaaaccgttagaaaaattttagtatgcactagacatgattccaagacattattgttaatatgtaggtgagataatatcactgttatcttgtgagacaatgtttgtgcttttagagatggatactgaagtattttaggtatgatgttacatgttgctgggatttgttttaaaaatttttagcaaagacaacatatatggcgcagtgtatattgctcagttgatgggtgcaccaggatctcacaaatcaccgctgaagaacttattcacgtaattaaatgccacctgtactccaataacttatgggaaaaaatttaaaaaatagcaaagaaggccgggcgtggtggctcatgcctgtaacccagcactttgggaggccgaggtgggcggatcacaaggtcaggagatcgagaccatcctggctaacatggtgaaaccctgtctccactaaaaatacaaaaaaaattagccgggcatgatggtgggcgcctgtagtcccagctacctgagaggttgaggcaggagaatggcgtgaacccaggaggtggatcttgcagtgagctgagatggtgccactgcactccagcctgggcaacagagcgagactctgtctcaaaaaaaaaaaaaaaaaatagcaaagaaaaaaattaagcagatgtggcttatttttgctggaaaattaatgaatctaaatgatgagtttatggggattcattatatcatcttttctgtatacaattggtagttacagaatttttcattaatttttttttaaaaaaatcagttattcccacataactgtatatcttaaaaccattgttttctacaaagaggtataatattattgtgtggttgctctgtgatggtacgagtaggcatccttattttatcaagtattgtcctcttaaattgcttggtttcttatcatggtggtctaatttctttgaggctctgtatctcaggcctatgttcattgataaagttcctttctctttgaaattcctattaatagacagtcttcaatcaagaacatattagttctgctaatacaatttatatgaaattttaccctactccataatttgcagaagctaatagtgtactaacaagggagcaggagcaataattgatcatatttgctttcccttagagagaagtgcagccatcagtcttagaagactgatgtaatgagtgccaagtgatggatgccccgtgcactcacgattgctagatctcccatgggtgtcctaaaaggaagcacgtggtctgttgggagatgcagacagcagaattatttggaaataggtggagccactgtcaatgagagacgtttcccctatctctattttaaaaaatgcaattctatcttaatcccttccttttttcctcaaaaatttaacaatgctaattctaagcttgtgtgcacttttcccagtggttaattataatccttttctttattaggttttattttgcagccttaaaaaataaaaagaaattaacaaaatggcttaaaggcaaaattagagcaaatctcattttcttaggagactctgcatttcatttattgttatagttcttacttcagagacagggaaggaagagaaggtagcttgatagtaaaataatatccttcaaggtaaattccatgaatgttaagtcaagcagaacttctatttttgtagcattctagagacattgaatccagtttcttgatgtttcttgccgcatttctcactctgttctacagagcaatttggtttacaggtaatttaagcttgggataaagctctggttaattcagtttctggataaaagaaagagtaattcaacttaaagatcaccatagaattttaatcatagagatgagaaagcaaggaaaggcataaacctcgttagtggtataatgggaaaagaattgtctcagatagatggttctagctcttgaagttttgctgtaagctgtaccagcactagaaaaaaggtacaatgggaaatgcagacctttagttttgtccaccttcctgatgttgcctttttcacttcagcttttcaacaacgttgctgaaaaggtctaccagtcagtgcccattatatatacgtttctcttcctttctccaatcccatctaaataatgaattctgtattccagatcttgatcctcattttaaacattcatttcctttatttaaattttacttatattgttattactttataccttaagatattatattttaattatagtgtttttattgaaatgtaatttttacatcatgaaatgcagactctaagcacacagtttggtaaattttgacaaatgtatacacctgtgtatcccacacccatcaagataatagaacattttcatcaacctagaaaattctgtcatgccaattcctaggtcatcagtgcctttcagttcaaaggagaatgtagatctgatttccatcaacagattcatttcacctgttgtggaattttatagaaatagagtaatacagaatatactcttcgaggtctgactttctgcatcagaaaaatattttagagtttactccatgttgttaaatggtatttcattaaataacacacctcagtttattcacctgtttttcagtttgtggccatttgggatgtttctagctttgaaatattgtgaataaagctgctataacatttttgtataaatctttttatagatctatttttttaaaattctacctaggagtggaattgctaggtcataaggtagatatatgtttaaatttataagaatctgataattttccaaaggagttatacctatttacatatccaccagcaaaataatatagttctagttgcttttcccttaccaacatttggtgcagccgtcagagttttaattttaatttggtccattccagtgggtgtacagtgatctgtcattatggttttaatttgtatttccctgatgattaatgattctgggcactgttttatttgcttattggttattgcatgtcttttgttgtttaatgtctgttcaatttgttgtttaatgtctgtttaatgtgtctattttttcgttgctgctttattgagttatataaatactttattctgaatctaagtcctttgagatatatatttgaatgatacatttcctgccggtctatgattttatgatctgcctatttattttcttagtggtaatatgtcaaagaggagaagtctttaattttgattaagttcaatttaaatatttttctttgtggctagcactttctctgtgttatctaaaaaagctttgcctccccaagttcataaaaaatattctcctatgttttcttccaaaagtttcataattttagcttttagatttgttactgatcaatttcaaattaatttgtgtatctggtgtgaggcaaggatcaatttattcatattagattattcagtcatttcagaaacatttgtgaaaaaaacttaaaatgactttccttaatgaattccctaggaacctttgttaaagatgaattgaccatatagctgtgggttatttctagattatcttttctgtcccattgatttatttgcctatgtttatggcagtgttacagtaccttcatttctgagttttatggtaagctctttaggtactaatgtggaagtatctttaaaacagagtgctgaatggaaaaaatgtacagattaatatgtctagcttttgtctaaaaaaagagaaaataacatatgttcatgtatgcttgactttgcattaaaaaccttggaagaacacaaatgatactaaagacatagttacctgtggcaggtagcagtatatagttactagacatatttgtgacaggaatataaagaggaataggaatttttattatatttttaaacaacatgactatattaattatgaaaagattaatttttaaaaagagtaagtgatataggaaatgtattctttctcagagtagataaaacattgagtgggcaattcattgaaataatgttttctaggtcccattagatattttttgggccttgaaatttttaatatctgttttacttgacaaatatttattaagtgccttttatgtatcaagcaatggtaatacagaaggcaacaagactgacatgttcctcatccccatggtatgtatattccagtggagggaaaacacaataaatcataaacaaataaaaaagatattttcagaatgtgataagtgctataaataacataaacatgacagaaagaggcaagatgaatgtgaaatggaagtcctggagaaggtcttccagtgtggtaacttaggaactgagattggaatgccaggaaggattcagagatgtgaagaatttgggtgttggggaggaacctgcaaaggaaaaggccctgaaaagggaaatggctgaagagaaacaggaaagaaggcaaggtggaagagcacggtgaatgtggtgcagaataaaattgcggcgacaggtagggactaaatcaagctgaactttagggaaatgatgaggaatttgggttttattttacatgaaatgaaaaactactaaaagttattggaagttactgaaagagtataatgatctgatcaagattaaaaaacaaaaagcattcattttattgggggaaaaataacagattaagaaggggttggcagtgagaaaggaagaaaatcagaagttacatcacataagccaagaaacaatagtgtttaaaaaagaagaaatgtcccccaaatgttccaactgaggacagagaaactgtccgctagatttagtctcatggaagtcttctatggtctgacaagagcaatttctatggagtcgtgggtagagaagatggactagaatatgatggaaagtggatggactctctattttatactcacctccccacctcactcccaacacatgaaagtgaatgagaaataaagaagtgaagaaagaagatttagatgactctttcaagtgctctatgtaaccgtagatacatggagatgttgtgtatatccaggctggcatatctgtgtgttggtttagcaaatacatatcaaaaattcttacatgaaaagctcctttataacaagatgttctcacttttttagtgacaaaatcccatgaataaatccaaaaagagtctattttatataaaatcccaccctgttggaagtattgcaagtttccactgaaatttttaatctgacttctagatatatttttggagtgttgtctattttgtcagcctgccagattatgtcaaaatgttgatatgtaataacagtttatctcgtgttcctttatccaccctatttacccacctcagctgtgttaactgtccttgactgattccactgcatcattaatactgccatagggaaccgtgccctgatcattcatactgccactaataggatgccaagtggatgtttcaaagttggatgctgatgattatcattgcgatgtatatgacatcgctaagacagcattttcagtcaaaaatatggctgccgtttaaggtgtgagctttttgcctttttacctagaaaaacaatgatatgtaaatttcttattataatttgtattactctactcttatttgctatttgtcaactctgcaagagacaagggttggtacagaaaatatcattttatcagaaggaaaccttgtcttctacagtaggtactaccttcttgagctgattctggataataaagcttgcttcgcaataatccagagttttccaaaccatatatttgactccctttactgactgatatgcaaagttgtgtttaactatatggaaaattgtgaatccttttcatccaagtctacacactccacttgcttttcccttctaccttgaattcatgtgcattcccccagttttctgcctttgtaatggaggcttcagttcttctgcagccacagttgcaggaaacccaattgtaatcagcagctgccctgctgctaaaagctattagtgccaatgttgttaatgaccgacccagttgaatgtgctgatttaaggggtagacttatttcttgtcactccctagggccttgttcttaaatgagatttctacgttgtttagttgtttactcctctagcataaggagtattaaccactaacaaccacacttcgtatatcagcacgttgaattgaaataatggggaggttaagacatatcactacctttgaggtatgaagacacgcgccctgaaaaaacttggctcctacccctaatttttgcctaaagaagttggataccactgcaatttgctctgaagttatacatgttattgtcttcaagggactataggatgagaagggtacagttaggtttcttttcagaactaaacacattagcagtaacctgcaaaaatcaataccaattacttgcaagcaagggcttaaaaaaaaaaaaaattactgaagctacagaatatgcccataggtgaatggcttaaaacaaagaaaatactggcatagctggtactctcacaaaatagaagcaaaagtagtaaagttctcttttatttattttggcattttggtattaatttgtaaaagccaacaactgttatatttaaaaagaaaaataaataaagcagcaaataactcaatataagaaggctattttactgtctccctggcatgactaaggtttgtgttgtctttctagcagacatcaaggcattcagaaggtgtatggggatggcttatctatataaaccagtaaaccttttattcaatacccagacattctgcatgccaatattatgtgtttagtgtctcgagattctatttagcagaaattcactttgaggggcttggtgaagccttcagaggtttaactgtgtagtctctcctttattcaaaaggctgaaataatatttttccggtttctggaattcttaagcttgcatttcagattaaactatcgcagagagtagaatttcttccttccttgtcttctagtagtaaagatggggcacatatctgtaagatgtggacccagaaactctactctcaagtctggctatgatgacgaagtcttgagaagctagtaagccttgctacctcattcaagtccacggtagagttgtgtatgaatgtatggagaggtgggggaagttccaaatactacagaatttccccatagttaacagccctgcttaccaaacaattgaggccatgtggaaatggtacctatcattaaatctcacatcagaaggaacgagttttggcatgtctgtatcgccaatatgagtatcaaaaaaggtaactgtggatcttcttggacagtcattttcctggacttcagtttggtcctccctggtcataaaatgatatgattcttaatacttgaaaaaattgtcccaaaacacaatatcacccaaaaaaaccctcttttaccagcttcctttttttttctttaattgcagagcctcaaatcgatatttaagaagtaagagaagtgaatggtggtcacacaatgcctgaaaaagaaagctctgagtagttgtctgggggacactagaaacaaaagaagtgtgtcacgtgataccataatggcatccagcactttccatatagggaaggcagacagggaaaagaaaattttgcttaacgtggattgaggaagtagtggactcaagtaatggaaaggaaatgaattttacagtattctgaggtactggtaaatttacttgctacggattatactgaaggtaaaatgctgcttaaatagagtctaagattttatgtatcaaatatttacctaatttttaaagcattaaaaatgttaggattcaatagttatagttactttcatcctttgaaacaaaaataattcttgtttcaattttatatgttgagctgttaaaagaaaattgaaagaggcaaacaatatatacttatttgtctctatgggtttgtgcagtttatagatatcctgagcagtgcttctagtgagcgttcttagtagcaccaggttggttgttaatggagtattgacccagcaatttactggggcaagcccttctgctctactcagagttgatgtgttttatattacaattgcatctaataccttattttacaacttcaattaatatagttgggtagaactcgaagaaagtttataacaaagctatgaatagagtaattcattattataaaagtgtactttgagaggagaaactaggattgtttttcctcagaaagaaaacactgatgtatgataatagtattctccaataaaattaaaaataaacatctaaagagacataacatttctgttgagaatagaaaacctgcactcgctgtctgcaaacactgggataatatctttcacaaaatgtttataatccagataaaaagagaagatatatatgtgcaaatcaagagaagaaatgaaatagagaagaaatgagagaagagatgacaaccactaaacaaagagtggagagagagaagtgctctgacagttggagggcaacagagatctctctgcactgaggaggccaaggaaggctttttaaaaagatgatatggggtgtgggtgttgaagatagaaggtgggatgtaaaatataagaaaaagggcaaagtttttgcacgaaaccttaaggtgaccattctcacttcggttccttggtttttgtggagggatagtaggtagtaaaattagggtgagaactttgaggatagattgagggtagtaatttacatcaggctaaggagttgtaggcattctcctataagccaggcaatagaaggccatcagaagtttacaagctgggatataatatgacttttataaacagcaatatgccagttgtgtgaaggatgagtttagagaaagactgaagctgagaacactaagaaaatgttttaacagtgatagggaaaaagtaattggatattttggctgaactccttaatagaaataatgaaaggaacacaaaaggaaaacacaaaatctagttcaatgaatacttaaaatttataagtgatagtataatcctataatttattctgaattaagaatccataattctgattctataattggaactatcccagaattctatgtcctatttgacattagtttgacttaaagattggcttatgtctcaatcaatcaatttgatggtgaccaagaatttcctttcaatttacagtttaatactggccagagaatggaaagtaaaaagccatagcacatgctatatatatgatccatagacttatcaaattcaaatttaatggggagtctaaaacagctatttggcatttataccccaggttttttctaatattttatcagagatatcaaagagacttcaaactcaattcactgactgatataaacagcaagctatttcaacagatagagaacgctgggataaagaaaaagggcttggaatttttttgaagtgaaaaaatatgtgtaaaaaatgcatttctaatagtcacaggacaaaagtggacagaatttcccattacagtaaaatttaatgaattcagttggttcttttaaccatcatatggtctcatcaagaaataagaaagaatatcattaagtggatatccccctttacataaaagctgaatacattttttttttttttttttttgagacggagtcttgctctgtcacccaggctggagtgcagtggtgcaatctcggctcactgcaagctccacctcctgggttcacaccattctccaacctcagcctcctgagtagcgggactacaggcacccactaccaagctcagctaatttttttctattttcattagagatggggtttcgccattcacaggataaaatctgaatacataatacattttaaggactgaaatcccttctataataactttagtaattactcactgttgatgaaaaatatcctaggccaaaagttttctctgtttgccccaagcagatggagtaagggctctgagtcaacctgacttccctctgcatggtgtcaagcactctgtggcttcatggccttgcaatccagttaatccctaggaaccaaacttacccaagtggttgtgtaagttgtacataataaatgtaaagtgcttagcatagcacataaaatgtaaagtgcttaacatagcacataacaaaaaaaattgttgagtaaacgaatattttgctctaaatagtgtgggccacaagatctactaaacaaattagattgtaaaacttctcaagggatatcctcggtgtatttggtagaggaaagaggaaagagatttgtaaaatgattgaaatatgttacttacctttaggattttttttcttgccaagctttgggttttgaacttgcggaatcttagagtcacaggaagaagaaatagatagctcctgtagtgctggctatagtctcatagagcccaaaaaggtaggaaggagatgatttagaaagtatgagagggtagaatgccagggaggtttctgaccagttgttttccaggccaaagcaagtaatgcaatgacttcttgtattaaacccatcatttatttaatcaaagataaagcatatttctattatttctataataatagaaattctacaagaaaggagagaaacctttaagttttccctaaagaaagccattcttcctattcttatgatttctgatgctagctacactgctttcaaaacacacgatcctttagggtacagaggagagaaaaggaattcgtttaaaacatgattttctatgtagatcatcaacgaatgaagaaagaaactagaaaaaagggggaagaaatgggtgaatgtagtatacttatttcagatatgaagatgtgcttccaggtacagcactagaggtacaaattcattctagagctttgttcactgctacttactatctctggaactacagtcactgcagaaccagggcattgaagcccaaggttaatacagattgtagggagcagacaaaattggatcgaagtccagatttccttgttttctaactggaaggggcttgggcatttcatttaataccactaagtttcaatttatccatatgtaaaatgagcctcatagaggtgttataaggaatcatagattactgcattcttccattctatgacataggcacatttcacattttaattgggatgattcttaaaatcaatggcacatcttttttggaagtgccacataaagtcatgaggcatcaaacaataaattctatcttaatttgataaaatacatgaaggtaataaaggcaaagtgcctctgacaacatctggcatctaataagcaccagcaaattgttttggggtgatgctcagtgctgttgctattaccccatgctacaccactcagggaagcatctctttcttcataaatgttcactgatactccagctcaagtgaatgcagtctagtgcgtattttgtgaaagagtaattaaagtcttaaatgtcctagtttctctaatcatctaaaatatcatacttttaatataaaaataataataccttaaaaatgaaatgatacatctttggaacatttatcaccttcaaaggacttgcaatcctcctacataataatggtactatattacttagttcttgggtatgaagagtctgtactgcacatagcactctgctaggcacgagttttccttgttttttctaatacaactttgatatgacctaatttcaccaccaaaaaaaccagcaccatatggcaagttccccatttcccctaaaataatttattgagcctttagtgtgtcccagtgactgaactctttatgctgaatttttctcaagatttcttcaggacatcagaacataatgcagattttttttcaggtggccctctaccaactggatatgaaattggatcagctggaggcaagaacagatggggttgagcagcagatggaaagatcctgtttaggatatgcagaatcactctggcaaaatcaatcatgccacaggagttagtttcagtttggtgaaagaaaatgaactcaagtagacaactgagttaccgggaaattaatacgagctcacactttagaaagtcttgattaagtgtcaataagacagatgagctaatgatgttgaattaaaagtcttaaatgtcacgtttgtcagtgatcataatagctctccatatttagtgcttaccctttaccaggcatttcaggtacagatctcattcaatccttacaaaaaccctgtgagacaggcatttttccgatatcacaaatgcttaaatggaagttctaagtaaattgatcaaggtcataggactctaggtaacagaaacaggattggaacttgtctggctagctggaaagcccacacaaatcatgaacactctactactttccagtgttaaatgatgtgtatacaagaacaattggaggagcatacggtcaactttcagatatcctaaggtcctttccacagtaacaattggaacaggcctgtgatggtcagagtgaccaccgggcatctgcttgaatctttgtggggaatacagagcagcgaggggggccacatggtccccagtaaagcagaggtcacaggtgtcacatacaggctctggtgaatcccacggagtccctgtagaaatctcacatctgcttaccccgagaaggtctcccagaatcctggagctgccttgctccagaagtggatctccatagcaaccttaggccaaaagagtctcatgcacccgttctagtccaaacatgctatgatggactttgtttccatggggcattcaatacatatgtgaatctgagattgtgagtggcttggagtacgtactgtctcagtccattcgggttgctattaaaaaaaaaaaaaaaacataaactaggtggcttataaacaacaggaattcatttctcacggctctggaggctgggaagtccaagacctgccaaggtattggtggatctggtgtctggtgagggggagttttctgttcatagatggctctttctagctgtgacttttcatggcagaggggaaaatgcactctctggggcctcttgtataaggtcactaataccatatgtaaaggctctgcatctcatgacctacttcccccccaaaaggccccacttcctaacatcactttgggtgttaagatttcagcatattaatttggtgggggtcacataaacatccaatccactacatctactttcttcaaaactgtaggcaagctgtaaagaagggaaaatcatttcagcccaagtattcgccctgctttaactttggagcaaaagcaggaaatagaaggaacttatcattcattgactgcctactatttgccaagcatggaaagaccatataatgggttggagggaaaataagataaaagtctgagcaacagatggaaacacatctgccaggtgccatgctctgtacgcattacttcattccatacagcattctcttgtattagtgagttcctgctgactgctacgttactttttcttctcagccaaatgttcaagaagcaggtactggttatgagtaagcatggtgaaaacccattttctaagaaacagaagagatggcaagtgtatcctctcaaagaattaaattttgttttctgccttatttttctcaaacaaaacaagcttttaccaattgcattaccatagccttgctatctatacataggtatcacagaaatcttaatctttgagttttcaagttagaggaattcttattaagcatgagagttaataatctcctgagacacaaatatgcctggtaatatgagaacaataaatgtttgttgggtccaaacatgaattaaagctgtatatgttatgccttaaagacattaaattaatcataaattatagtgattaattacattaaaacagtagcattatgaatacacaagatacaagtttcagtttaaggaaaaaccatattttaataatccccaagtacgcctgtattctgagacactaaaaataattatatgctactaactataccttgaaaacgcatacactcttactgaagacacagaaatgaacagaacagaactaaaaattgaatacattttgtgacacatgatttttttcattgtaatatttctgaaatttggatgcatcttggaatctatgacatcttatagttgccttcagccaggtggcagtcgtgatgtcacaagcaatgcttgcatgtaggagaacaacgtgtaagacacatgtcagcatcttgcaagaaaacctcagagtcaattacagaccactcttattattcctaggacctacttgttttgaaagaagatgggtgagacaatgtattatatatgtttaacatacaggaagcaaaagtaaaaaaagaagtctagttctatgtcattgccaaatgacttaagagtctagcaccacagcattttagttgcttaacagatttaaatgttacattgcgcttgctttggcagcacatatgctaacactggaccaatacagggaagatcagcaaggcccctgcacaagaatgacacataaatgcataaagattccatatttttttggaacacaaaggataaatgcttcaggggattgacacccaattttccatgatgtgactgttacacatggcatacctgcaccaaaatatctcatgtaccccatgaatatatacacctacaatgtacccacgacattaaaaataagttaacattttttaaggaaatattacctcatcttatctcttgatggcatagaaatttatattttaaaactgttatatataattatataattttataatcatacaattatatttttatatttttaaataaatatataatttaattatataaacatttaattaaattatacatttaattatataaacatttaattaaattatacatttaattatataaacatttaattaaattatacatttaattatatattaactatgtaatttaattgtatgtttttatatatttattatataatatagatccattatctatatttatacatatatctatatacataatatatttaatatatattatttatacagaattatatataattaggcttaataactctgagtcaaaaacgtgattcaaagagtcaaactctacatgaaaggaagtttcagaaatatctcacccaattaactttgcttatattttattttaagtatatttaattatatttcaatatatttttatatttcaatatattatattgaaatatattatattgaaatatattgaaatatatatttttacgtttcaatatattatatttttatatttttatataaagcaatatataaaattatatttcaatatatttcaatatattatatttcatattatatttcaatatatttcaagatattgtttttatatttttaaataaatattttataatttaatgacatataaacatttaattaaattgtacatttaattatatattaactatgtaatttaattatatatagttatatatatttattctataatatagatcattatatttatacatattttatatgttatttatacagaattatatgtaattaggcttaataactctgagtcaaaaacatgattcaaagagtcagactctacatgaaaggaagtttcagaaatatctcacccaatttattttgtttatattttatttttgtgtatatgcaataaataatttaaaaatttataatcaagctgaaaagagttctttcagcaagcacaaaattttccagtgattaaaatttactgagtccgtttatttggtggtatttttcttaggttttttttttttttcatgaaacaatgataactgctagcatcgtagatacaacaaaataggggtataaaaatatgcgggaacatgaggagatggtatacaaatctacagaggcatgaaacaatagaaattagcgccaatctggaagttaggagatagagatcccaggcttggttccataattaaggagctgcgtgatcttgagcaagtcacttaatctctccgagcttcaaccataaaataaggagctgtgatagataatttccgagctccagagagcagtgatgtaagcaatcaggaaaatagaaccttccctcgatgctccaaggaagaagggatctgatgtgggtcactatgtgcttatgaaagtgacggaaaggagtcctgaggttgaggaaggccagtcactgctggcctcagcttctctaatggctaccgagggattagacattgcctccaggcaggtcagaaactcaaggaaacttccccacaggtcacagcagcctccggtatctattggtgaactgctaaaggctactaaaaaccctttaggttccaaactctgcatgtcagcaggccactgccccaatacacacttctctgccatccaaatctcccacaggagtttcttactggtcgcatccaagacaaagctctgttaggcaaggggttctgggaaatgtagttcctacactgccagtccctgtgctgtaggagagatcatagaatgaggtaggaatggggctgagtgtcacagacagatatctggtaccccagctggggagcgagggactatgatggcaacgcaggtgaacaagagggaggggacggcatgaagacagattcagaagtcatggagaggaaggtacacatctgaaagacacctcaaaggaagaattgaaagattagatatgggttactttttctttccacactagtgagtcaatataatctataaatcaagtctctttagctcctctgctgactatcatgttctttttccctagctctcctgtaacagggaacaatacaccctttttcttgtagtgcaagaataatgatttgctggcagaagctccgtgaatcagactttgcactgaacatgttatattgtttgggaacccagctaaatttttccatgactgctttaaaagtgatttccatttaaagctaggtggaacaaattcctgctgctggctaaatcttctttttcttttccaatgaacagaatctcataaaaaggactattgctcttttgtacttttctgtgatgcattttgtgttggggtctatggaggaagccatctaaaactacagagtgttgtaaaaataccctcgtaattctactagaattcaactttttaatagctgtctttcttctccttttatatctccttttcaattatttctttccctttggtactctgacagactaatgtttctgggtctttcatagacacctacatcgaccaaatggatccatctcccacctttgagatcctcattaaactctggcagagtttggtggctacatgaactcaaaccccagacgtatggagaaagaatcactttcaatagaaaacctaacatcaccagtacttacaattctgactaatttttgtcataaataaatacagtggacgtcatttatgtccattttgagtctgtatctatgttatatcacactttgcctaataataatgctgctgtcaatttaatgagggttttagcttacataaataacaaacattcagttcagtggggtttatcttaaactgtacagaggtgcttgttttattataattcaactgaatcagaaactttctttctctccacttgctcacactggcttctaaccaactcacgtttctttaatgacaagtgctaaataaacttcacctggggactgatctgccaataaggataaaaaaaagaattgccccggctaccaaagtatcattgtttcatctccaatgaaacattcccctgtaaaaccatttctctctatgcaaggacttggagtaggaatccagccacagaggtcagggaaggccccaccaccaccatccccactgactcagaaaaggattaaaatattttaaagaaggaggaccagaggacaaaacgtcagcatggtcaagaaaaagtgagcagagccatgaatcgagtgatgaagttgtagattcatagaaaacatgtaaaggctatcatatatgtagaggtaaagtgtcactcctcgttttaagggtgaagaaatgaggcttgcaggagttaagtgtcacacagcagatagtggccaagatagtggccaagccaggctgagtcccatgtccaaatcagtgtactgcttgcttctctgtgcacctgtcatctttagtggtggtgaatggatgagcagtattgaggttaataccctaagaaataacacagcaataatgctcaagtgtaatctagtaataataatgattggaaatcaacattactgtagtgacttcaattgtgtgccccaaaaagatatgtccaagttctcatccctggtacctgtgaacatgaccttacttggaaacagggtttgtgcagatgtaatgcagttaaggatctgcagattaagatcatcctggacttagaaatctactctaaatccactgactggagtcctcatgagagaaaggagagagagctttgacacacagagaagcaactcatgtgaagacccatgtgaagagagaggaagagattgaagttctgtggtcacaagaccaagaatgccaggagccatgagaagctgaaagaggcaacaaacctcctcccctggagctgtggagggagtgcagtcctgctgaggcctccattgtggacttctggcctccattgtggatttctggcctccagagctgtgagccaatacattctgtggttttaggccatcaagtttgtggtcagttgttacagcagctttaggaaactaatacaactatgaaaatacccaatctaaaaagcaatccaggaagaaatttttgttgtcctagtggtttgttgttgtcattgttgattttaacaaaatatagctcaaataacagtactttgaacttttcagttaggaataattacacacgtaacggctcccctaaatgttttttagcctaaagactctgtcaacatttaatattatataaaaggctctgtctacctccccagcctcgtgtcctcccagccttccccttcccccagtattccagccacactggtcttctctttggttccagaacatgctaggacccttctcacctcaggcttctatgtgctcctcctttggctggcacactcctcccccaccatgcaccacctccccagtcaacatcagctccaaagtgcaactctacgggaagccctcctgcccctttataatagatcagccccacacatacactctctttgtaaactctcctaacaccctttccctcttcttcacagtcatgatcattgtttgtaatttttcatttatatttctggattgtctgtctttcctgctggactgtcactctctgacggcaggcacaggacattttgctcatcatgacatttcatgggtagcatgatgcctggcatatagcagccactcataaatatttggaaaataagtgagtgatagtatttagccttggatggagctcttgtctgttattcaaacttatagctgttctgtttccaacatataaaattgaaattgtagaaaaatctgtacatagtcataatttgaaaattaacttattttagtaatgtcttaatttttctcctctgagtttctaaatgaattcatgaaagttctgctttgtcccaaaggcatttcataaataagtaagcatagctaaaagggactcaaacctgttacatttcaccatgccatccgagttcatggataggtgaatttgccctaattagtattatccatttatataatcaataagcatgttgggtaccgtattagtccattttcatgctgctaataaagacatatccgagactgggcaatttacaaaagaaagaggtttaatggactcacagttccatgttgctggggaggccccacaatcatggcagaaggtgaaagtcacgtctcacatggtggcagacaagagaagagagcttgtgcagggaaacttctctttataaaaccatcaagattcatgagacttattcactatcatgagactagcacaggaaagacccacctccatgattcagttacctcccactgggtccctcccacaacacatgggaattgtgggagctacaattcaagttgagatttgggtggggacacagccaaaccatatcattctgccccagcccctcccaaatctcttgtcctctcatttcaaaaccaattatgccttcccaacagtcccccaaagtcttaactcatttcagcattaactcaaaagtccacagtccaaagtcttatctgagacaatataagtcccttctgcctatgagccagtaaaaccaaaagcaagttagttacaccctagatacaatgagggtgcaggcattagataaatacatcattccaaatcggagaaattggccagactgaagaagctaaaggccctatgcaagtccaaaatccagcagggctgtcaaatcttaaagctccaaaagatctcctttgactccaggtctcacatccgggtcacactgatggtgggctctcacagccttgggcagctctgtccctgtggctttgcaggctatagcctccctcctgactgctttcatgggctggcattgggtgtctacagctcttccaggtgcatggtagttctccatgagcaccccgcccctgcagcaaatttctgcctggacatccaggcatttccatacatcttctgaaatctaggtggagggtctcaaacctcagttattgacttctgtataccttcaggctcaataccatgtggaagctgccaggacttggggcttgcaccctctgaaaccattgtccaacctgtaccttgaccccttttagtcacacctggagcggctgggatgcaggacaccaattccctagactgcatacagcacagggaccctggggccaccccacgaaaccatttttctctcctaggcctctgggcctgtgatgggagggactgccacaaagatctcttacatgtcctggagacattttccccatagtcttggtgaataactcggctcctcattacttatccaaatctctgcagccagcttgaatatctcctcagaaaataggatttttttttctatcacattgtcaggctgcaaattttccaaacttttatattctgattctctttttaaactgaatgcctttaagagcacccaagtcacctcttcaatgtttttctgcttagatattttttctaccagatactctgaatcatctctctcaagttcaaagttccacaaatctctatggcaggggcaaaatgctgtcagtctctttgctaaagcataaaaagaatcacctttgctccagttcccaacaagttcctcattccatctgagactacctctgcctggattttactgtccatatcattatcagcattttggtcaaagccattcagcaagtctctagggagttccaaactttcccacattttcctgtcttcttttgagccctccaaactattccaacctctgcctgttacccagttccaaaattgcttccacattttttggtatcttttcagtagggctccactctacttgtgccaaaatctgtattagggttctctagagggacagaactgataggatagacatatatataaagggaatttattaagagtattgactcacatgatcataaggtgagatcccacaataggccacctgcaagctgaggggcaaggaagcaagtccaagtcccaaagctaaagaactttgggtccaatgttcaagggcaggaagtagccagcacaagagaaaaatatagaccagaagactaagccagtctagtctttccacgttcttctgcctgcttttattttggctatgctggcaggtgattagattgtatccacccagattgagggtggatctgccttccccagtccattgactcaaatgttagtctcctttggcagcaccctcacagacatacccaggaacaacactttgcatccttcaatccaatcaagttgacactcagtattaaccatcacaggtacctaatagattccaaagattgtattttaaaatatgttttaatctatagaagagaaaaagaagataacaagaacagtaatgagaggtaaatcacagtgaggctgggtggcggtaaaggaacatttccagaggcagtcactcttgagctgagtcttaaagagtaggagaaagtgagtaaagaaagccatgaaggttgttttaggtcagggtttcttatttttgacatttttcacagaataattctttgttgtcaggggctgtcctgtgtgttttaggatcttaacagcatccctggcctctgtccatgaggtgctagtgtgacaaccaaaatgtctcctgaagatttctcaatgaactgaaaacagaactgcagtttgatacagcaatcctactactgggcgtctactcagaataaaagaaatcattatataaaaaggatgcctgcacttgtatgcttattgcagcactattcacaatagcaaagatatggaatcaccgtaagtgtctaatggatgattggataaagacaatgtggtgtatatatgtgtgtgtgtgtgtatatatatgtgtgtgtgtgtgctgtgtatatatatatgtatacacacacacacacacatatatataccatggaatactactcagccataaacaagaatgaaatcatgtcttttggagcaacatgaatggaattggaggtcattatgttaaatgaaataactcagaagcagaaagccaaatacctcatgttctcacttataagtaggagctaaatgatgtgcacatatggtcatagagcatggaataatagacactggaggctcagaaagggaggagggtgggaaggggaatgagaaattatctaatgggtacaatgtacactatttgggtgatagttatcctaaaagccagacttccccactgtacaatatatctgtataacaatactgcacttttaccccctaaatctataaaaatttaaaaattttaaaaaacgaaaacaaaatgtcacctgacattgcaaaatatctcccctggaatgcaccttcttcccagttaagaaccactggtgggggcagaggaaggagcctatctgcagttgggggtgtctgagttactgcagcatgtccaggtagctctaggagagtgcccgggagggagataggagagaaagtacaacactgctcttacacagggggtttcatgtcttatgctggggagtgtggaatttcatcctgaaagcacttatgcagaatcaaaggatcttaagtaggaagtggacatgggctaatttgtgcttaagaaaaatcactctggtcacagtggaaaggaaggatcgaatggagatcagaatgaatttgaaagaattgaatgtaatccagaagagaaatgattcatggggacagaaaggaaaggaaagggaagatagaaaggtactcacatcacatctctaagaccttgtctagaatgggatctagattcttggtttggatgatcagaaagtagaatcataaatcttctccaaaatccacttggaaattagccctcatgactttatgaaaaaaaaaatcaaacccttgaactcagaaaaattacttgtaaagttggttaagcataatctaggtgacctcatgatgtaataaataaaaatagccactacctccggcttcaaattcaattaggccttcagcaaagattatttcagcaaattgtcaaaaatattagtttttaatcaatgtattagaaaactgtagtaaattttcaccccctgcccccaagcaatgtctagacaagtgagacagagagacaaaatgagtaattgaggccatttttcttgcctgattgttcagaaaattgcctcatttctttgctttattttctgagtccacataatgataacagaaaaagttgtatgtgtggatattttttacaatctgaatctttgacagtgttgagagaggtaatcgccaacaaacacactatcacagcatttgccagatcgtctgttttctttcaggcttttgtcagtatctaaggcaagtcctttgtgtgagaactgactagataaaatgtcatgagcacctcctgtgagggaaagaccgagactgagatctcagtcataaagagactccccagctacaggtgctacaaggtgtgcaaaggcaattaacaatttggggcaaagcgcaattttcatagactctgttttgcaaaaaaaaagaccctacgctacctatttcacaaagttattcacatttctagctcatgaggaacacaggatattcaggccctgctaaaggatatgaataggtcatccaggttttgattaagagattgtttgaacaagtcccaagtgggaataattcaaattaaagcaagaatgtgtcaatacatctgaaatgttgaagaatgcaaaaatagtatttatacataaatataaaatataaatggaatttttatgtgttgatcaattatgtatttttaaatatttggcttcaataacaatataagaaaaatgaaattcctactaatccatagaataatgtgtactttcttttaagaaatcaccaaccttaaaatcactaaaatatgatacatttaacaaaatggtagattttaaattataaaccaaactgaattcagaaagtaaaaattatgatacacagtttatattggtcaaagttgccattaattgtttattatcattaaaaataaatacatatgtttcacttcacatgtgttacacaggtgcttaatattttattaatataaatgcataattcatttgctcttcacaaccacaaaaactagatacatgattattcccattttgcagataaggaaattaacacccaagtgaaatactttaccaaaggtcacataggtagtaagtaacaactgtgtgatcagaggagagcattatctccaaacttcgtgagagacacatataagcaattagtcccttacagactaagaaattttgatacagacaatttgttgcagattcataagatagtacagccagttctgtgaatcacagtgttatatttatttccacatattctatgttaataatataatttttaattccatgtattttaagttttcattcaataactgctataagtatatgcagctctgagaacaagggggaagagaataatttcagccatttaaaaatagcttttatatttagatttaaatatttcagttgcatttcttttttttttttttttactttttacttttctttttttttttttttttattatactctaagttttagggtacatgtgcacattgtgcaggttagttacatatgtatacatgtgccatgctggtgcgctgcacccactaacgtgtcatctagcattaggtatatctcccaatgctatccctcccccctcccccgaccccaccacagtccccagagtgtgatattccccttcctgtgtccatgtgatctcattgttcaattcccacctatgagtgagaatatgcggtgtttggttttttgttcttgcgatagtttactgagaatgatggtttccaatttcatccatgtccctacaaaggacatgaactcatcattttttatggctgcatagtattccatggcgtatatgtgccacattttcttaatccagtctatcattgttggacatttgggttggttccaagtctttgctattgtgaatagtgccgcaataaacatacgtgtgcatgtgtctttatagcagcatgatttataatcctttgggtatatacccagtaatgggatggctgggtcaaatggtatttctagttctagatccctgaggaatcgccacactgacttccacaatggttgaactagtttacagtcccaccaacagtgtaaaagtgttcctatttctccacatcctctccagcacctgttgtttcctgactttttaatgattgccattctaactggtgtgagatgatatctcatagtggttttgatttgcatttctctgatggccagtgatgatgagcatttcttcatgtgttttttggctgcataaatgtcttcttttgagaagtgtctgttcatgtccttcgcccactttttgatggggttgtttgtttttttcttgtaaatttgtttgagttcattgtagattctggatattagccctttgtcagatgagtaggttgcgaaaattttctcccattttgtaggttgcctgttcactctgatggtagtttcttttgctgtgcagaagctctttagtttaattagatcccatttgtcaattttggcttttgttgccattgcttttggtgttttggacatgaagtccttgcccacgcctatgtcctcaatggtaatgcctaggttttcttctagggtttttatggttttaggtctaacgtttaaatctttaatccatcttgaattgatttttgtataaggtgtaaggaagggatccagtttcagctttctacatatggctagccagttttcccagcaccatttattaaatagggaatcctttccccattgcttgtttttctcaggtttgtcaaagatcagatagttgtagatatgtggcattatttctgagggctctgttctgttccattgatctatatctctgttttggtaccagtaccaggctgttttggttactgtagccttgtagtatagtttgaagtcaggtagtgtgatgcctccagctttgttcttttggcttaggattgacttggcaatgcgggctcttttttggttccatatgaactttaaagtagttttttccaattctgtgaagaaagtcattggtagcttgatggggatggcattgaatctgtaaattaccttgggcagtatggccattttcacgatattgattcttcctacccatgagcatggaatgttcttccatttgtttgtgtcctcttttatttccttgagcagtggtttgtagttctccttgaagaggtccttcacatcccttgtaagttggattcctaggtattttattctctttgaagcaattgtgaatgggagttcactcatgatttggctctctgtttgtctgttgttggtgtataagaatgcttgtgatttttgtacattgattttgtatcctgagactttgctgaagttgcttatcagcttaaggagattttgggctgagacgatggggttttctagataaacaatcatgtcgtctgcaaacagggacaatttgacttcctcttttcctaattgaataccctttatttccttctcctgcctgattgccctggccagaacttccaacactatgttgaataggagtggtgagagagggcatccctgtcttgtgccagttttcaaagggaatgcttccagtttttacccattcagtatgatattggctgtgggtttgtcatagatagctcttattattttgaaatacgtcccatcaatacctaatttattgagagtttttagcatgaagggttgttgaattttgtcaaaggctttttctgcatctattgagataatcatgtggtttttgtctttggctctgtttatatgctggattacatttattgatttgcgtatattgaaccagccttgcatcccagggatgaagctgacttgatcatggtggataagctttttgatgtgctgctggattcggtttgccagtattttattgaggatttttgcatcaatgttcatcaaggatattggtctaaaattctcttttttggttgtgtctctgcccggctttggtatcagaatgatgctggcctcataaaatgagttagggaggattccctctttttctattgattggaatagtttcagaaggaatggtaccagttcctccttgtacctctggtagaattcggctgtgaatccatctggtgctggactctttttggttggtaaactattgattattgccacaatttcagagcctgttattggtctattcagagattcaacttcttcctggtttagtcttgggagagtgtatgtgtcgaggaatgtatccatttcttctagattttctagtttatttgcgtagaagtgtttgtagtattctctgatggtagtttgtatttctgtgggatcggtggtgatatcccctttatcattttttattgtgtctatttgattcttctctctttttttctttattagtcttgctagcggtctatcaattttgttgatcctttcaaaaaaccagctcctggattcattgattttttgaagggttttttatgtctctatttccttcagttctgctctgattttagttatttcttgccttctgccagcttttgaatgtgtttgctcttgcttttctagttcttttaattgtgatgttagggtgtcaattttggatctttcctgctttctcttctaggcatttagtgctataaatttccctctacacactgctttgaatgcgtcccagagattctggtatgtggtgtctttgttctcgttggtttcaaagaacatctttatttctgccttcatttcgttatgtacccagtagtcattcaggagcaggttgttcagtttccatgtagttgagcggctttgagtgagattcttaatcctgagttctagtttgattgcactgtggtctgagagatagtttgttataatttctgttcttttacatttgctgaggagagctttacttccaagtatgtggtcaattttggaataggtgtggtgtggtgctgaaaaaaatgtatattctgttgatttggggtggagagttctgtagatgtctattaggtctgcttggtgcagagctgagttcaattcctgggtatccttgttgactttctgtctcgttgatctgtctaatgttgacagtggggtgttaaagtctcccattattaatgtgtgggagtctaagtctctttgtaggtcactcaggacttgctttatgaatctgggtgctcctgtattgggtgcataaatatttaggatagttagctcctcttgttgaattgatccctttaccattatgtaatggccttctttgtctcttttgatctttgttggcttaaagtctgttttatcagagactaggattgcaacccctgcctttttttgttttccattggcttggtagatcttcctccatccttttattttgagcctatgtgtgtctctgcacgtgagatgggtttcctgaatacagcacactgatgggtcttgactctttatccaacttgccagtctgtgtcttttaattgcagaatttagtccatttatatttaaagttaatattgttatgtgtgaatttgatcctgtcattatgatgttagctggtgattttgctcattagttgatgcagtttcttcctagtctcgatggtctttacattttggcatgattttgcagcggctggtaccggttgttcctttccatgtttagcgcttccttcaggagctcttttagggcaggcctggtggtgacaaaatctctcagcatttgcttgtctataaagtattttatttctccttcacttatgaagcttagtttggctggatatgaaattctgggttgaaaattcttttctttaagaatgttgaatattggcccccactctcttctggcttgtagggtttctgccgagagatccgctgttagtctgatgggctttcctttgagggtaacccgacctttctctctggctgcccttaacattttttccttcatttcaactttggtgaatctgacaattatgtgtcttggagttgctcttctcgaggagtatctttgtggcgttctctgtatttcctgaatctgaacattggcctgccttgctagattggggaagttctcctggataatatcctgcagagtgttttccaacttggttccattctccacatcactttcaggtacaccaatcagacgtagatttggtcttttcacatagtcccatatttcttggaggctttgctcatttctttttattcttttttctctaaacttcccttctcgcttcatttcattcatttcatcttccatcactgataccctttcttccagttgatcgcatcagctcctgaggcttctgcattcttcacgtagttctcgagccttggttttcagctccatcagctcctttaagcacttctctgtattggttattctagttatacattcttctaaatttttttcaaagttttcaacttctttgcctttggtttgaatgtcctcccgtagctcagagtaatttgatcgtctgaagccttcttctctcagctcgtcaaaatcattctccatccagctttgttctgttgctggtgaggaactgcgttcctttggaggaggagaggcgctctgcattttagagtttccagtttttctgttctgttttttccccatctttgtggttttatctacttttggtctttgatgatggtgatgtacagatgggttttcggtgtagatgtcctttctggttgttagttttccttctaacagacaggaccctcaggtgcaggtctgttggaataccctgccgtgtgaggtgtcagtgtgcccctgctggggggtgcctcccagttaggctgctcgggggtcaggggtcagggacccacttgaggaggcagtctgcccgttctcagatcgccagctgcgtgctgggagaaccactgctctcttcaaagctgtcagacagggacacttaagtctgcagaggttactgctgtctttttgtttgtctgtgccctgcccccagaggtggagcctacagaggcaggcaggcctccttgagctgtggtgggctccacccagttggagcttcccggctgctttgtttacctaagcaagcctgggcaatggcgggcgcccctcccccagcctcgttgccgccttgcagtttgatctcagactgctgtgctagcaatcagcgagattccgtaggcgtaggaccctctgagccaggtgtgggatatagtctcgtggtgcgccgtttcttaagccggtctgaaaagtgcaatattcgggtgggagtgacccgattttccaggtgcgtccgtcacccctttctttgactcggaaagggaactccctgaccccttgcgcttcccaggtgaggcaatgcctcgccctgcttcggctcgcacacggtgcgcacacacactggcctgcgcccactgtctggcactccctagtgagatgaacccggtacctcagatggaaatgcagaaatcacccgtcttctgcgtcactcacgctgggagctgtagaccggagctgttcctattcggccatcttggctcctcctcccttcagttgcatttcaagtatctttttctgctaagaatttggcctgtctgaatttcaaaaggcatttgggcttcaaactttagttaatggtaaaaaaaaaaaataactaaatatttaatttcctgaaatagttccaaattacagaaacagagagaaagcttaaataccatagaacaaaaattcatagaatagaatttatgaatcatgattcatacacaaaagaccaaacctctcaatgaataactgtattgttgacagtttgggaggaattttaattttgtttttttttctcaaatagtgagatcagagtcggaaaagccttaacatctccatattagagattctgtaactcacatcacttatgccaggctccagctacgtactctgaaaagtatattaaatcagaatgaaaattgttcagtaaaatttctcctagaggtatagtaaatatgattgatttaatacatcattgagattctactggaaaaatggcataaaacagcaacattctgttgccattttataactttcatttttgtaaagtgaccattagcataatatagtaatatcattatgacaatctgcacagatgaaaatatctcaaggccaatattacattttcatcaagtaaatgaccatgtgtttcaataaacacgattatgaatgttaatataccaacagattgagtattttcatttctcagcatcattgtttgtaggggaaaacaaattaatcatctttgagataacaggagtgtagacttttagaacatgatctgtttcactacaactattcttggtttgctgaataagagtcaggattttactccagactgtcctcatctgaggtcatcttatctgtccccttctgaagtaatcttgtcattatgtaaatacctatgcagcattatcaatttagagccagataatttaagatgaatcacgtctttattttgataagtatccacaggacacccatttgtacagtagaaacatgcaaagaaacctcttcctcctgcctgttctattgtcttggacaattcctgaataagctgttctccagccctgcacacctgcgagcaggccagggactctgtggacccagccatgccctttctgtcaccaaggccacatttgtggtcaggaggcaagtgagatggtcatcactttcacttaagtcctttttagcaataggcatgttaggcattggaatggatgtgcaagcgaaatggacacaaaccaaaaatggaagaggcaacctgtctatggccttaccatcccgaatatgcctgatctcagaagctaagcagggttggtttggctagtacatggatgggagaagagataactagctgagacttcagtatctagcttataggctgcttcagccttcaagcacagcttaattatatgtattactggggaagatccttttctggaaagaggcaacattttaagaccattcaagattaacctttacttgagcaaaaagaaatgtttctactttcaaatgctttttggtaaaaatctttaaaaaataataaatgcttcaaagagaataaaacagctaggaatccaacttataagggatgtgaaggacctcttcaaggagaactacaaaccactgctcagcgaaataaaagaggacacaaacaaatggaagaacattccatgctcatggataggaagaatcaatatcgtgaaaatggccatactgcccaaggtaacttatagattcagtgccatcccaatcaagctaccaatgactttcttcacagaattggaaaaaactgctttaaagttcatatgcaaccaaaaaagagcccgcattgccaagacaatcctaagccaaaagaacaaagctggaggcatcacactacctgacttcaaaccatactacactacaaggctacagtaaccaaaacagcatggtactggtgccaaaacagatatatagaccaatggaacagaacagaggcatcagaaataacaccacacatctacaaccatctgatctttgacaaacttgacaaaaacaagaaatggggaaaagattccctgtttaataaatagtgctgggaaaactggctagccatatgtagaaagctgaaactggatcccttccttacaccttatacaaaaattaattcaagatggattaaagacttaaatgttagacctaaaaccataaaaactctagaagaaaacctaggcaataccattcaggacataggcatgggcaaggacttcatgtctaaaacaccaaaagcaatggcaacaaaagccaaaattgacaaatgggatctaattaaactaaagagcttctgcagagcaaaagaaactaccagcagagtgaacaggcaacctacagaatgggaaaaaatttttgcaatctacccatctgacaaagggctaatatccagaatctataaagaactcaaacaaatttacaagaaaaaacaaacaaccccatcaacaagtgggcgaaggacatgaacagacacttctcaaaagaagacatttatgcagccaacagacacatgaaaaaatgctcatcatcactggccatcagagaaatgcaaatcaaaaccacaatgagataccatctcacaccagttagaatggcgatcattaaaaagtcaggaaacaacaggtgctggagaggatgtggagaaataggaacacttttacactgttggtgggactgtaaactaattcaaccattgtggaagacagtgtggtgattcctcagggatctagaactagaaataccatttgacccagccatcccattactgggtatatacccaaaggattataaatcatgctgctataaagacacatgcacacgtatgtttattgcagcactattcacaatagcaaagacttggaaccaacccaaatatccatcaatgatagactggattaagaaaatgtggcacatatacaccatggaatactatgcagccataaaaaatgtcctttgcagggccatggagaagctggaaaccatcattctcagcaaactatcacaaggacagaaaaccaaacaccacgtgttctcactcataggcgggaattgaacaatgagaacacttggacacaggaaggggaacatcacacaccaaggcctgtcgtggggtggggggaggggggaaggatagcattaggagatatacctaatgtaaatgacgagttaatgggtgcagcacaccaacatggcacatgtatacatatgtaataaacctgcacgttgtgcatatgtaccctagaacttaaaatataataaataataagaataataataaattatttttctgatttgtttaaaaaaaatcactgtattccttggctgcagcacagcagcaaatgtagctagtataagaactacttatcctgggtcccaaaatatagttgcttgaaaaagtctatattgcgaccttaatttttagtgctttgcctctttgggaactccagtgtgaagagaggtatgcacaacctcacggtcctcaggttgttatcacatggccgaacactttacaacatgaattcatgaattatgtagttaattattacatcaaagaagatctcgccgcacttatcacaaacactcttagttatagccccacaaccttaattgttattgccaagaatttctttccatccactcttcctattttgcaaactacaattacagaggaggtatgaatgaaaagttttctgtatcattccaaaaatatgttaagatgttctgaaaagttctgattccttgatctacgagtgacttagcaacatgattagatgagacaaaacccatagctacacatctttctctagaagtcttaatgtcgactcttgacaaaatttcagatccattcaaaatttcaaatacgttaaaataaaaaaattaacactctaatgttgagattgagtagactatacaaagccttccttaaagattacattttttgcattttctagttttcattcattgcaagaatgtttgtaattgctcagtgaatggctaatttcaaatctgtaccaggtaattctcacatctctgtcatctcacggctgacacctattgattttctttctttttctttcattcactttgagatcttcctggtccttgacattgtgagtgactcttggttgaaacctagacattttagatattattttatgagactacggatcctctgctggttgaaacctagacatttaagatattattttgtaagactatggatctgctgctgtcatcctctctctgcttttctttttcttctccacttactcctacccctttaatccagtgctcaagtaggaccagggaaacattaaaagttggcccacagatggaaggaacattgtacttcatgtgtcacatttaaattctccaggaagaaagggcttgtcaataaagtgtctttttaagtcacagatggcagtaaggctgtgctactcccaccttttctttctattcattgtctcctaatgtcatttattttctgaagtatctaagtagcaccaccactatccaagactgacagtctccatttatattcaatcataactcactagtgaagattaattggggaggagacaagtctgaattagaaatcaccaaagtagtattttaaaagaagtgcagatttattgcattcaattctagacctaattcagagacatggctagaactgttacgaaggaaatgtcttaaacggcctgatttaaagcatagagacaacccatttgtacattagtagaaagtaatgtgttttaaatctttaacaatggttttcttgagtagattaactaccgctttaaaaatcctatttatttatctcctacactaagtaaatttcaacacaacccttttctgaattttcacaaatactacaggagaggaatctaaattagaagctcgattatatatgttatttctgtttaaaaggcactaattaagctgctttgccctgtgagcactagaatttgggttggcacagtcatttcataatctgaactctaacacaattatttctggatgaaccattgccataaaatttaacaggctatattagctgttggttggcattgatgatctataaatactaacctttatctcttgatattttttctcattcttttttatggttaatttagaatttcactgattaggcatttgcttatataaagtgctttgttaagactcaaaacatttttaagcatgtttatgctgcaaagtgaatgagtgttgcaaagtttgacttagtgtagaaagattgtaagactagaagttacttttagaaaacctaaactatcttgtagaaaaattatctcacggtttttaaaaatggcgttcaaaattcagagagaacaattcaagcttgttgctagtggaaagttaacagtggtttagatcagttgtacacactgtgcaagatgtttatgtgctgacagcttgtgtgcctacctccacatcaattcggccattataccagctaattcttctatctaggattcataacataaaaatgtgcttcctctttctgagggaaagttgactatgggtagagaagagttgccgttatttcaccttgaagaataacaatataagctcatgtgcaatgaaatagcagacttattggaaatgattactagcttcttgaaagcaaagaagtatatattttttaacttcataaggatttagaagttgatcattcatcatccccttctgcactctgagtgctgaaccaactgaaaaagagatggaagcaagtgtcagacagaaatcaaaacagtagctcagactgtgtttctcttgtgacataggcccttcaaaccctactttttgaaagagtggctaggatacatgaagtcattacagtatcaactgcatacccacaacatttagaaaatataaaactccccagcccctacttcaaggttatgttctcagaaccagatatatagtgcagtctagccctgcatcatccagcacagtggttcctagccacatgtgactgttgagcactcgtaatatggctactgtgacagaggaattgaattttcattgtgttttaattaatttaaaattatatttaaaaactgattctcaattcactattggaagactttgaagtctacttgaaacaatttcaggtatgtgcatctactttttcaaccataagctacatggaacctaagtataaattagttatttctaattagaataattaattccattaaaatgaaaaggccaaattgagatatgctctcagtacaaaatacataagaattttgaagacaccgcccaagaaagagaatataaaatagcccatttataattgtttacatgttgaaagaattgtattttggatatacaggattaaataaaacacgaaaattgacttttaaaaattcatctgtttctttttacttctttaacacgattactagaaaatgtttaattacatatgcggctcacattgtatttctattagactcactctactagagtgtgatgtagattcaccctctagttggtgtgtaaaagtcatggtggagatttcattgtatctaggggaagaagaacaaactaatgaagggggagaaggagaaaaccttctgactcccaggaagccaactggtctgggccagtttgtgtctctgcatgacttctgagcctgaacttaagtggaagaaatctcccaccaagaagttacttacattgccaggtgtttgtttcttctcagacctaggattactgagctctgagtgtcatcttacctggatgcttcttctcctactcttgtttattaaaagctgttacttctctaggctttgattaacattaactattaaaattacagtgtaggctcggcatggtggctcacacctataatcccagcactttgggaggccaaagtggacagatcacgtgagatcaggagtttgagaccagtctggccaacatggtaaaacccggtctctactaaaaaaaaaataagtacaattgcaaaacaaataaataaataaatctgcagtgtaaaactctcttttactctctattttcctattgcaacataattcagctttccctgggtagccattccttaatcctaggtgagaaaaaatatatattaaagatgaaacatctactaatgcccagccctgcaaaaaacttatactcccatttctggtggaggcaacattgaaggttggctctctggtgtctaaaaagatgttctgcccatgtcgatttgaacacctattttttgtaaaaggccttgccctttccacatggactatgaaggacccacagaagtgaaactgtgtccccagtctaaactccctgggagaacctctcctgactcaataaagaattggtttttctgcccaagaacagagctctgcttgattagtttgaggtcgaggagaccacctggatcaccaagataaatgctttttcttgctaacccaacgcagaaacaggtacatttctcagttcttcaaccggccgaccctgctgcctcctggagcccatatagggtttcttgttcagccatagttctagaccttggctgcattttggaatcacctttctagtctcgagcataaaataaggcccagagcccaggccagactcactacatgagcattttcagctactaaggagaacttgaagaaaagaaattggccaagcagcggactcatgtgtgccctggcacttttcctatctcactaatcgcccttctcatatcataactcacccttctcatgaaaaaatagaatgaataaatgtggacggggaaatgccgaaacaccctcctcataacttgcacacgaatcctcctctatgttcgaaggcagggaaagagagaaaatggtaccaaagatagcctgtgtgcagtacttgaggcaaggctttgcatgtttcaagcgcccaatacttatctgttgacacaaagagtgccgtaattatgttagaattagtttggctttttttttttttctgctctagaaacattttgttcgtataagtcaaaaattagaaagaaagtttggaatttaatttcttatcaggcaatagccaagggaaaatatttctgttaaaggagtaatcatacagaacagctaaaattccaggaataataaaactcaggaaattttggggggagtggggtggttaggttttggaaaatatttgtcagtaatatttgaaaatccagatcttccttaaaagtctacagatttgagtgtacccctcacccaaggaaatctgtctcaagagacagaatcagtccatttttcagggttccccaggaaagtttgtcacagccagacataaatgtgatgaaaggcaggaaagggagagacagaggctgggacaaagaagatgacagactttattggtaacattaggccagaatgataaccataacccaggctgtgttttcaaagttgttgttgtaaactaaatgttttggtatatttgtcagaactttttatcttggttagtttaattaaaataaagtcggtagccaaaataaaattatgtaaaggttaatcaggatgtttcctgtattttttgacataaaccaaattaagtagttatttttctaacacatggaattcttacatttgtctccgtgcaagatgtatgttaatgttagttgttttactacatttgaaattcagtcttttaaaatgggttttctctgttctcctccaaggctatttgagcatctaaatatctacatattacatggctgttggcaaaagttttcaaatgctattcactcaatttgaaaaaaatttgcacttcttataaagctagtatgaatgtgactctaaaatctcaccaattggcactaatcaggttcatcatcaaaataaacctgataaatattaaaactaaattgttgagttggttttgtaatgtcaggattttcaagacaacaaatggccaagaacttggcgtcagaggaagtcctgctttcggttgattcttgatgctgattgagaacaggcctcctaagcactgatgggaatatttgcctctaagaagtacagcccatttaccacttagaagctaaagttcagaaataaaactctgacacaacaaaatatcaataaagccagatagagcactagaaaaattcgtaaatctctaatatgaatatacatctctaatacaaattacattcaagcaacagtgatttgcctcggctgcaagtaattatgtacctattgttaaaatagtgtgagtcacagcaagaacatggacaatatcaattcccttcagagactggactctgtgaagcctttccagttctaactacacagtacgatctttttaaaactatcagctttgcactcatttcagacccaagtatgttgaactggatgaggtattactttcaaggacaaggactggacgttaatcaaaatgaaaatactctttttttcttttttgagatggagtctcactctgttgcccaggctagagtgcagtggcgtgatcttggcttactgcaacctccacctcctgggtgcaagcaattctctgcctcagcctcctgagtatctgggatgacaggcgcctgccaccatgcccagctaacttttgtattcttagtagagacagggtttcatcatactggccaggctggtctccaattcctgacctcaggtgatccgcctgcctcggcctcccaaagtgctgggatgacaggcgtaagccactgcgcccggcctaatcaaaatgaaaatactttcaacatggaaataaagctttccagtgctaaagcttctgttttcttagagcaaaagagctccactaagaagaaaactgaatgttattgagatgttgtttaataagttcctggtatgtagattgaattgtgtcactgccaaagaagataggttgaattcttaactcctggaatctgtgaatgtgaccttatttgggagttgcagatgtaatcaagttcggatgaggtcatactgaagtaaagtgggccctaattcaatgactggtatcctcataagaaagacatgtagacatagccacacagggagggcgccaggtgaggacaaagttagagtctaaaagctacgtgtacaagccaagaggaattaaggattgctggcaactaccaggaactagtaagatgcatggaaatattctcccctagagacttcagagagagagcacagccctgctggcacctgcattttggacttttagtctccagaactgtgagaaaattaagttattttgtttgaagctacccagtttatggtaatttgtttcggcaaccctgggaaacttctatataaggctatgtcagaactcctcttatctcttaggaaaccaaagttctatccttaagcgaatataagatgtaagttcacagataactcagaatgtcctcccgcttctcaagaactagtcctgggtttgcattatccttataaatgccctaagatgattttttcaagcatatgttaccaagaagtagggaagtttcagcattaacaatacatagcttcgtaacaattagccatctgtttataatgctgttagggatcgacagcatctcaatggaagcagggaaaacaacagaaatatcatatctgccaagttctagtcatctgttatgttacatagtaatttgtcatctcatgagatcaccaaggagagaaaaaagccatgccgtgctacaaaataaactctgtaaagcaggtagtttaatagcaaattaatgatgtgctgacaagatcaagaccaaaaaaaaaaaaaaaaaacatgtcatattttctgcagtgcagctaataatgcaagtttgtaagctgtctcacaagaaggtagtatttattttttccaaggagctatttgaaaaccagagagttaacatattttaagacagttttcctcaatgtcagtttattttaaatattactagagttcagatattatcttgctatcactcttaatatccatcttaattatgggagtccctgtggtaaagtctaacctctttcaatctcatctcttgacttgatgattcatttcaaagaatgtgttagtacaatggggcttcttctcaagagcaaagtaactttgaataaaatttacaaaagtaaaagaaataaagcagatggcaaatattgcccacagaattggttatagtatcattatccattaagaaatgaattttgtacaatagatgatttaggtcttacttatctgtctctcataaatatgtatatatgcaatattaagatagatatactgatattgcaaactggcaataaaaaaggtggctttaatatttcgtatggtttggctctgtgtccacacccaaacctcatcctgaattgtaatttccatgtgtcaagggagggacctggtgggaggtgattgggtcatgggggcggtttcccccatgctgttctcaggatggtgagtgagttctcacaaaatctaatactttgaagggatttggagactgggtgcagtggctcatgcctgtaatctcaacactttggaaggccaaggtgggcagatcacctgaggtcaggagtttgagaccagcctgaacaacatgctgaaaccccatctctactaaaaatacaaaaattagctgggcacggtggtctgcgcctgtaatcccagtgttcaggaggctgaggcagaagaatcgtttggaccaaggaggtggagattgcagtgagcagagaacacaccactgcactccaacctgggcaacagagtgagactccgtctcaacaacaacaaaaaaaattagccatgtgtggtggtgggtgtctataatcccagctactcgggaagctgaggcatgagaatcacttgaacccaggaggcagaggttgtggtgagccgagatcacaccactgcactccagcctaggcaacagagtgagactctgtctcaaaaaaaaaaaaaagtgtttggcagtttcctccttgctctctctctctctttcctgccaccatgtaagacatgccttgattccccttctacttctgccatgactgtaaatttcctgatgcctcctcagccatgaggaactgggagtcaactaaacctctttctttataaattaccgagtctcaggtcattcatggcagtgtgaaaatgcactaatacaatatttggaaactctatgcaacaatacagggttcatatattgtccagcctgaattaaagtgctatgtgttatctctcctatcaaactatctttaagatgatgacaaagggatttcaggtgacaacttggaatgaaagatactgacccactgtttgctttcctgtagcttttcctcaagtggataaaaacaattacagctttttttcactagtctactaaattgaactcttaatatcaccccagctgcttttcttgtaggtgttcctttctatgtcaaccacacttctgtttgtgataaggattttcacctcatctgatgaaaagagcagtctactgtgagaaagaactaagcttctactcccaaagcacaagcagtttctgtcaaagcaggaatacaaatatggtcccttggaacctagcccattgcctttccaacataatggtggttattgagccatcagaccatgctttcagcagatacttgaacttccactgtgtatgaatcattatattagtgtaatagagctgtagagataaataagacctagcccatgcttataaatgcctcataacacaaaggacagagaaattatgcataaataaatgcaaaataaatgcagataaatctccatggctgttcagttacacaggcatccaacacatccattgagtatttaccacataccaactttgtcctaaagactgatgatgacacaaattgaaccagatttaggcaaccaccaatctcacaaagtttgcaatccaattagaagagaaaagaatttaaaacagccattgcattatagaatcattaatgcaatgaaaggaagattcccaagtactaagagaaggcaacgctgggacacctagcctaatctaaagggcccaaaataaatatccttaaagtggcatataaattaagacattaccaagtgtggtggctcatggctgtaatcccagcactttgggaggctgaggcatgaggatcgcttgaggtcaggagttcgagagcagcctgggcaacatggtaaaaccccatgtctaataaaaatataaaaattacctgggcatggtggtgtactcgggaggctaaggtggaagaattgttcgaacccaggaggcagaagttgcagtgagccaggatcgtgccattgcactccaacttgggcaatagagtgaaactccatctcacaaaaaaaaaaaaaaaaaaaaaaaattaagacacgaaggataggagttagttagccaatatggtattttgtggtaatgcagctataatctaatcaccgatgaaacagtattccagcaaaccacttcaaggaagctttgaaaaccgaccacatccttttggcctgtccatcatcaaaaaagataatagcccgacaaaccatgggttataaaatgcctgacacataactgtgattacagcattagaggtttaaaatgcaactaggaaaacttgaaaatataagcaccaatttcaaatcactagtcatttgcatcaatttcaaccattcccccgtactcctccaagcattctatttggcttgtgtcgtatccaagaccatccgaaatcacagaataaatttcctataacatgcatctttcgtgtgcataataatgcatactaacaatttacaatttgttataatgtcctataatgtacttctttattgcatctgtgtgactaaagagggcagtcgggagaaaatctaataggagaacttcctagggttgaggttcttcagcttaaaatctttataactgggaccccttacattagcactcagctttggccagtatgtctgagaccactcatatatatatacatatatacacacacacacatatacacatacacacacatatgattgttttgtcattgtaccttgtaaaaaggtatttgttaccaaaatgataaaaggaagtgaactttaaaaaatacatgtcttattactgtcatttggagtattcctcaaaccactgattgtatatgatatagctacctctaggaattcaagctcaagttattcacaacactaaagatacaaactgatttccaaaggtattatccaagaaattaaccgtttataagggaagcaaagtatctttccatttcttttatatttttatatatatatattttaagttctagggtacatgttcacaacgtgcaggtttgatacagaggtatacatatgccatgttggtttgctccacccatcaactcgtcatttattttaggtatttctcctaatgctattcctcccccaggcccccactccctgacaggccccagtgtgtgatgttccctgccctgtgtccaagtgttctcattgttcatttcccacctataagtgagaacatgtggtgtttggttttctgtccttgtgatagtttgctgagaatgatggtttccagcttctccacggccctgcaaagaacatgaactcatccttttttatgactgcgtagtattccatggggtatatatgccatattttcttaatccaatctatcattgatggacatttgggttggttccaagtctctgctattgtgaagagtgccacaataaacatacgtgtgcatgtgtctttacaggagcatgatttataatccttttggtatatacccagtaatgggatcactgggttaaatggtatttctagttctagatccttaaggaattaccgcactgtcttccacaatggttgaactaatttagactcccaccaacagtgtaaaagcatttctatttctccacatcctttccagcatctgttgtttcctgactttttaatgatcaccattctaactggtgtgagatggtatctcattgtagttttgatttgcatttctctgatggtcagtgatgatgagcattttttcatgtgtctgttggctgcagaaatatcttgttttgagaagtgtctgttaatatcctttgcccgctttttgatggggttgttttttttcttgtaaatttgtttcagttcttcgtagattctggatattagccctttgtcagatgggtagattgcaaaaattttctcccattctgtaggttgcctgttcactccaatgatagtttcttttgccatgcagaagctctttggtttaatcacatctgatttgtctattttggcttttgttgccattgcttttggtgttttagacatgaagtccttgcccatgcctatgtcctgaatggtattgcctaggttttcttctggggtttttatggtttcaggtctaacatttaagtctttaatccatcttgaattaatttttgtatatgatgtaaagaaaggatccagtttcagctttctacatatggctagccagttttcccagcaccatttattaaatagggaatcctttccccatttcttgtttttgtcaggtttgtcaaagatccaatggttatagatgtgtggtgttatttctgatgcctctgttctgttccattggtctatatatctgttttggcaccaataccatgctgttttggttactgtagccttgtagtatagtttgaagtcaggtagcatgatgcctccagttttggtcttttggcttaggattttcttggcaatgaggggtcttttttgcttccatatgaactttaaagtagttttttccaattctgtgaagaaagtcattggtagcttgatggggatggcattgaatctgtaaattaccttgggcagtatggccattttcatgatattgattcttcctatccatgagcatggaatgttcttccatttgtttgtgtcctcttttatttcattgagcagtgttttgtagttctccttgaagaggtccttcacatcccttgtaagttggattcctgggtattttattttctttgaagcaattgtgaatgggagttcactcatgatttggctctctgtttgtctgttattggtgtataggaatgcttgatttttgcacattgattttgtatcctgagactttgctgaagttgcttatcagcttaaggagatttggggctgagacgatagggttttctaaatatacaatcatgtcatctgcaaacagggacaatttgacttcctcttttcctaattgaatgccctttatttctttctcctgcctgattgccctggccataattcccaacactatgttgaataggagtgatgagagaagacatccttgtcttgtgccagttttcaaagggaatgcttccagtttttgcccattcagtatgatattggctgtgggtttgtcataaatagctcttattattttgagatacgttccatcaatacctagcttattgggagtttttagcaggaagggctgttgaattttgtcaaaggccttttctgcatctattgagattatcatgtgttttttgtcattgattctgtttatgtgatggattacatttattgatttgcatatgttgaaccagccttgcatcccagggatgaagctgacttgatcatggtggataagctttttgatatgctgctggattcggtttgccagtattttattgaagatttccccatcgatgcttaccagggatattggtctaaaattctctttttttgttgtctctctgccagccttcggtatcaggatcatgttggcctcataaagtgagttagggaggattccttctttttctattgattggaatagtttcagaaggaatgataccagctcctctttgtacctctggtagaattcggctgtgaatctgtctggttctggactttttttgattggtaggctattaattattgcctcaatttcagagcctgttattggtctattgagagattcaatttcttcctggtttagtgttgggagggtgtatgtgtccaggaatctatccatttcttctagattttctagtttatttgcgtagaagtgtttatagtattcgctaatgatagtttttatttctgtgggatcggtggtgatatcccctttataattttttattgcatctatttgattcttctctgttttcattagtcttgctagtggtctatcaattttgttgatcttttcaaaaaaccagctcctggtttcattgattttttgaagggtttttttgtgtctctatctctttcagttctgctctgatcttagttatttcttgccttctgctagcttttgaatgtgtttgctcttgcttctctagttcttttaattgtgatgttaggatgtcgattttagatctttcctgctttctcttgtgggcatttagtgctataaatttccctctatacactgctttaaatgtgtcccagagattctggtacgttgtgtctttgttctcattggtttcaaagaacatctttatttctgccttcatttcgtcatgtacccagtagtcattcaggagcaggttgttcagtttccatgtagttgtgtgattttgaatgagtttcttaatgctgagttctaaattgattgcactgtggtctgagagactgttgtcatttctgttcttttctatttgctgaggagtgttttacttccaattttgtggtcatttttagaataagtgtgatgtggtgctgagaaaaatgtgtattctgttgatttggggaggagagttctgtagatgtctattaagtctgcttaatgcagagctgagttcaagtcctggatatccttgttaaccttctgtctcattgatctgtctaatattgacagtagggtgttaaagtctcccattattattgtgtgggagtataagtctccttgtaggtctctaaggacttgctttgtgaatctgggtgctcctgttttggttgggtgcgtatatatttcggatagttagctcttctttttgaattgctccctttaccattatgaaatggccttctttgcctcttttgatctttgttggtttaaagtctgttttatcagagactaggattgcaacccctgttttttttttgttttttgttgttgttgttgttttgctttccatttgcttggtagatcttcctccatccctttattttgagcctatgtacgtctttgcatgtgagatgggtctcctgaatacagcacgctgataggtcttgactctttatccaatttgccaatatgtgtcttttaactggggcttttagcccatttacatttaaggttaatattgttatgtgtgaatttgaccctctcattattatgttagctgtttattttgctcattaattgatgcagtttcttcacagcatcgatggtctttaccacttggcatgtttttgtagtggatgataccggttgtttctttccatgtttagtgcttccttcaggagctcttgtagggcaggcctggtggtgacaaaatctctcagcatttgcttgtgtgtaaaggattttatttctgcttcacttatgaagcttattttggctggatatgaaattctgggttgaaaattcttttctttaagaacgttgaatattgaccccaactctcttctggcttttgggtttctgctgagagatccgctgtttgtctgatgggcttccctttgtgggtaacccgacctttctttctggctgcccttaatattttttatttcatttcaaccttggtgaatctgacggttatgtaccttggagtggctcttcttgaggagtatctttgtgatgttctctgtatttcctgaatttgaatgttgacctgccttgctaggttggggaagttctcctggataatatcctgaagagtgttttccaacttggttgtattctccccattacttttaggtacaccaatcaaacgtagatttggtcttttcacatagtcccatgtttcttggaggctttcttcatttctttttactctcttttctctaaccttgtcatctcactttatttcattaatttgatcttcagtcactaataacctttcttctacttgatcgaatcagctgttgaagattgtgcatgcatcacaaagttcgcgtgccatggttttcagctccatcaggtcattcaaggttttctccacactgtttattatagttagccattcgtctagccttttttcaaggtttttaacttccttgcaatgtgttagaacatgctcctttagctcagaagtttgttattatcaaccttctgaagcctacttctgtcagcttgtcaatgtcattctctgtccagctttgttctgttgctggcaaggagctgcaatcttttggaggagaagaggtgctctgatttttagaattttcggtttttctgctctggtttctccccatctttgtggttttatctacctttggtctatgtgatggtgacctacagatggggttttggtgtggatatcctttttgttgatgttgatgctattcctttctgtttgttagttttccgtctaatagtcaggtccctcagctgcagttctgttggagtttgctggtggtccactccagaccctgttttcttgggtatcaccagcagaggctgcaaaacagcaaatattgcagaacaacaaatattgctgcatgatccttcctctgggagcttcatcccagaggggtgcctgcctatatgaggtgtctgtcggcccatactgggaggtgtctcccagttaggctacacaggggtcagggacccacttgaggaggcagtctgtccattctcagagctcaaacactgtgctgggagaaccactgctctcttcagagctgtcagacagggatgtttaagtctgcagaagttgtctgctgccttttcttgagctatgccctgcccacagaggtggagtctatagaggcagtaggccttgctgagctgtggtgggctctacccagttcgagcttcctggccacttcgtttacctactcaagcctcagcaatggtggacaccccacccacagccaggctgctgccttgcagtttgatctcagactgctgcgctagcagtgagcaaggctccatgggcatgggaccctccaagccaggcatgggaaaggttctccttgtctgccggttgctaagaccttgggaaaagtgcagtatttggtcagaagtgtcctatttttccaggtacagtctgtcacggcttcccttggctaggaaagggaaatcccctgaccccttgcacttcccaggtgaggcaacgcctgccctacttcagctcaccctccatgggctgcacccactgtccaatcagtcccagtgcgatgaaccaggtacttcagttggaaatgcagaaatcatccatcttctgcatcgatcacactgggtgctgcggaccagaactgttcctcttcggccgtcttggaatggagctctatctttccatttcaatgcagccactttagcagttctcttaaagctgaaaatatatagaaaaagataaaacctttcaacagctacagtgatcctgaagtaaattactgtgtatatgacacagtgcattatcaaattgttgctgcatcagcatgtcattttcaaaatgaaaacaagtctattaaagtgcatatcgaaggtataaagtaggatgatagtgtatagtttgatcatgagatattgcttgcagtgtaagtttcatagaagaaaaatggtttgagaaaatggatcaaagggaaatctccaagttgacaacaatgtgttaagagaatgagaatttcaaagtacaactactgaaaaagccaaatttatgcagacaaagtgaaaaagaaatgaatcaaccctggaagagggagaatcagcacatcaccgtcaaggaaaacaagtacaagaataaatggatgttaatttcagctcacaagacagtagtaatttcaaaataactaaggaagggaagtgaaaaaataaactgcagtgtcataactgactcttgatccggagggatgtataagtgtccctgaataatgactgtagttgtggttttgcttttctagcctccttgcttgataaaaaagcctatggaatgatgtaaaacatagattgcagataataagtttgtgccaaggattggctggtttagctcaatttcatatcaacttacaatttaacctagagtattttacatcatctcatcagtttatccatttaaattgattatcttgatcttcttttattttttaagatcatccagtaagtatgtattcagcatctaacctgtactaaatattttgctaaggttgagggagacattaaactcacaacactcctataagatggacattattattacttccatttaacaggtgaatgactaaggcaaagtcatattagatgcccaaggtaacacagctagtaaatggcagaattgttgtgttagttcaggtcctccaagaagcagatgccaagacaagaatatatgtgcaagagatttatggtattgatctatgttgaaaatttggtgaggaagttgcaggagcctaactgagagagactcaggccataacgctggtctgaccctatggaggaaagagggaaggaaggaagattgggtaggaaatttcttagtctctggtgcagttctagaaaattttggcaaggctcatgggaagtccttgagctaaagtagcccatatgaggagccccacatcttgcagaaatgggcctgcctgagtatctctccctgctcagcattgcctggggcagcccatggaaagggtggcccagaaattgatgtggtggtggatcccaagcagctgaccatctgtcattcacactcctgcaccaggaagttgagaggccatgttactggtcccacagctgagatctcaacccataaaccttgtggcagagaaaacatgctcaaccccaatgccaaggcaatcctggcattcaacataaaatcagagaatgcaaatctttatatgccgcaattcataaattctttgcatttttttagtctgcttctgcttatatcagagatagaacatccaaggccaacaatacacttcttgtccttgagaacaggtggaagtcacctaggaaaatggaacataaggaggatgggatcctcttgtggcatctgttgtgaccctaggagagacattgtggatggcgaggggatacaaattctggcttacctccgtggtctgaggatagggggatcctttcagagtccctcctatccctcaggctaaccaagcatctccccctaccctcaactattacctggtcccaggtaagaaaggaaggaggctttccagcatagccttacttttggctgggcttggcaaagaaggtgtttggagtaattatggcccctcggtcacccatgaactcagaccaaccatcactggcctcccttccagatgatctctatttgagcagtttggtaatattttggaaagtacatttcactcatttaatgggaaaataatttaaatatgatttagatatgtattgaaagaatttactagatattttaaccatgtgacttgttgttgttgctatttgtattaggggaaagatgccagggaaattaggtaactagtctaaagtcttgcaaaagtaggcaggatttgaacttaagtctgtctgacctgaaggccacattccttctcctccatggccccctgccccagatattttactgggctcgggctttacaaaatgcttgtacatgtgctatttcatttgaactgtaatattagctactattttccagtccagtattatgggacttaaagacgtcagtgccagaaggtctattggttcttttcccctcctgggactcctcctctgcctcagttgccctcattggggtatcagcccccactacagccattacaaccggcttggcacgtccacaggggctgctgcccactgaagtgggtacaatttctttatccacccattcttctccattcctttctcttttttttttttttgcccctttttttaaccctatcttcattcttgagttcattcctgccctattactcctccaaagcacacatgctatccactcttcttcactttgagactatgtgagtcgtggccgaatagttcgggaatttattttgcacaatttgcacaggccagctcctctcacatctgcttcaatgatctctgtctttatcttcccagttctggtgtctttccttcagctctggatttcttgctttggttggagccactacctcgacatgctcctgggtaatgcttttttcgtacgtgttttaacttttattcacatgagtgaaattgatttttaaattaccactgtccctagcaggaaaaagccagtggcagagccagaaagagaatctactcctccttggcccaccctacattctttgactatcacaaatgccctgtggagaaagagaaacctgcccaccctgtgtgttccaatttactgaaataacatataaggcatgatttggttattttggaattcctcaatttctgatgttatcataccacagaattttgggactatttatcagttgagtgttaacatatcagatccaactttgtaattcttctttttagcagttgattatatttttgaagcccacaagcaccaatttcagggaaaatataagcctaaaatcattcactagaaaactacagaaccgaataggagagtaaatattatttaacttatgcttatgatttgatgtctttatttcttttttattgtgaagcagaattacctttgcctagcattctactgactcaccagtctaaccaatctaccttctgagggtggcagcaagatgggcaaatctggagatgagctctttcaacaaataaacatcatgatagattcctggaaggatttttggtgttttggccgtaactttctagttcaaattgctcattcatgaatcgtcacaaaatgacattcaaaaagaaagtaaatcttgattcaattcattatactatgaagcttttgacttaagaattagaaaaaaaacctttatccaacaaacacccttttttgggggcgtagattacttcctcaattccatcttaccacagaatcaaatattcccaagtatcaagtatccttctcatgtgaaattcttgctataaatgccaaacaagaggaaaaaagaaaaatgtacaaataattaaaacacaaatatatagcatgttagtaggcattgtgtgaatgaaaaaatagttcatgtctctttagatttatgcacagataagagataccattcaatacatgtgctgatcaaagcctaaatatgaacattcaataaagtaaaagtgctaacaaaaatttgagtttggcattaggtcaccaataatgttaattgattgtacttatacataataaaagctaacattttaaatctatcctgatagacaggaataggaatccacgctccagcttgggatcaagaaaactaaaattagtaacactaactggactccttaccactaaggagctctaaccagaaacgtttgttaaaataaaaagatagggagtgtatactagtatgcctttggacttagctaagaaaaatgtaaaatataaaattgtattagtccattctcattctgctaataaggacatacctaagactgggtaatttataaaggaaagaggtttaatggactcacagatctacatggctggggaggcctcacaatcatggcagaacacaaaggaagggcaaaggcatgtcttacatggcagcaggcaagagagcatgtgcagaggaactgccctttataaaaccagccaatcttgtgagacttattcactatcacaggaacagcacaggaaaaacccacccccatgatttaattagctcccacagggtccctcccacaacacatggggattatgggagctacaattcaagatgagatttgggtggggacacagccaaactatatcattctgcccctggctcctcccaaatctcatgtcctcacatttcaaagccaaccatgcctttccaacggacctccaaagtcttagctcattccagcattaactcaaaagtccaaaatctcatccgagacaaggcaagtcccttctgcctatgagcctgtaaaatcaaaagcaagttagttccttcctagattcaaggagggtataggcattgggtaaatacacccattccaaatgggagaaattggccaaaacaaaggggctacaggctccatgcaagtccaaaattcaacagggcagtcattaaaccttaaagttccaaaatgatctcctttgactccatgactcacatccaggtcacaatgatgccaaaggttggctcacacagccttgggcagctctgcctctgtggctttgcagggtatagacccccatctcagctgctttcatgggctggcgttgaacgtctacagcatttccaggctcacggtgcaagctctcagtggatctaccattctggggtctggaggacggtgacgctcttctcacagctccactatgcagtgccccagtgggaactctgtgtggggggttccaaccccacatttcccttctgcactgacctaggagaggttctccatgaggggcctgtgcctgcagcaaacttcttcctggacatccaggcatttccatacattctctgaaatctaggtggaggttcccaaacctcaattcttgacttctgtgttcctgcagactcaaaaccatgtggaagctgccaaagcttggggtttgtgccctctgaagccacggctcaagctgtactttggctccttttagccatggctggagcagcttggacacagagcaccaagtccctaggctgcacacagcaggggggccctgggcccagcccatgaaaccatttttccctcctaggcctctgggccagtgatgggaagggctgccatgaaggtttctgatatgtcctggagacattttccctgttgtcttggtgtttaacattcagctttgtttgtttgtttatgcaaattcctgcagtaggcttgaatttctccccataaaatgggtttttcttttttattgcatcatcaggctgcaaattttccaaacttctatgctctgcttcatcttgaatgctttgctgcttagaaattcgttctgccagataccctaaattatctcactcaagttcaaagttccgcagatctctagggcaggggcaaaatgctgccagtctctttgcatatcaagagtgacctttcctccagttcccaacaagttccttatctccatctgagaccacctcagcctagactttgttgtccatatcactatcagcattttggtcaaagccatttcacaagtctctaggaagttccaaactttcctacatcgtcctgtcttcttctgagccttccaaactgttccaacctctgcctgttacccagttccaaagttgctttcacatttttaggtatctttatatcagtacaccatttcccggtaccaatttactgtatttgtttgttctcatgctgctaataagtacatacccaagactgggtaatttataaaggaaagaggtttaatggacttacacttccacatggctgggaaggcctcacaatcacagtggaagggaaaggaggagcaaagtcatgtctttccgggcaggcaagagattgtgtacaggggaactgccctttataaaatcaacagatcgtgtgagacttattcactatcatgagaacagcccaggaaaaacccagccccatgattcaattacctcccaccaggtccctcccacaacacatggggattatgggagctacaattcaagatgagatttgggtggagatagagccaaaccatatcaaaaatgcttccagtgaatagacctggggaaaataaaacaaagtaatttttaaaaatgcttaacatgaccaggcacaatggctcataccgtaatcacagcactttgggaggccaaggtagtaggataccttgagcccatgagttcaaggccagcctgggcaacatagtgagactctgtctctacaaaaataataaaaataaaataaataattatggttttaaaaatgcttaacataaccctttctacttcagcaggagggatagatttacattttgggatgttttcagcatcagattactctgggtgaccctaccttcagaagcagataaaagtggtaacaacacaattaaggagtattcttcagtgaataaaatatttgagagtacagaggtaaagaataaaagttctgtggtcccatctagggctaaatgtcaacaccataaaaatcatactgaatcactctgatcctatcactgcagaactgaaaattattccatttattttatacacattgggacccaaataagttccaacttatataaaagaatgaaaagtaaatcctgacaacctaccggaagagaacactctgccccgtgctttccattctccttcgaatgcgtgagtgtctctccctgtctctctgtcctgctctctcacgtcactttcttttctccatctttatttcactcttctttggtgtctcctttgcttactgacatgtattgggcttttttcttatgcattgtcctcctcttattgcttattattattagtgctgctgtgcgaaaagttttgtttctttttttatcatttcaaaagcagaggagaaaaacgtttaaatgtatattgctcagccaaaataatgtttatttgcatgggaacttcgatttgtgtgtgtttgtgtggtataccagagagaatggggacagcaatttttcctattgtagaacgagaaaaggaccaacccctcttcaataacaccagataatgggtaaagtggctgaagttagttattatgtgctttaccaaaccttggaatcaaattgtaatacaaatattattgttattccttcctttccctccacatttttttttaaatagcagttagggggagtgatattcccctactttgctctgtttggtcaatctctggctcatcataaggtagagacgatgttttctaggaagcctgaacgtagggtgcttattattggtgtgatgtttagtttgttaattcccaccagcctgagaccaccaggagcacaccacagaaaggtgggtctgtgggcttgcaagaacaggaacattagaggggggtgtgcactgtggggaactacggggcatccttgtaagggaatgtggagaggaggatattataggattggggctggtgtcgggtgatttcagggagtgaagatttgttgtggattgggtggtgctcaggaatggatgcaaattgatagcaggagggcccacgtggggctgtttgtcattgggaaaaaagtggtagccagtcaggttagccagatgagggagtttttcggttatttttgtggccacacatggttttggtgttcagacacaacgaaggcttttttgtgttgtttggccatgatcatggagtgaacctgtttgattattgctgatagtctatggaattgtattatgttcaggagtctagctgttacctcagtctggctggtacctgcaaactgccagctgccagagcctttttgtttttccttctttctcaggtctcagagtaaatgttaaccaatcggtcagtccatccatgtgtaatagctgctatgcccagcactgagctaaacattatgaacaccatatggggactttctcattaataaaacacccacatttaaaaagtaatggaaaagaacataaaagaactagagaatacttaactaatatttgaaaccgaagtaaatattctatcactcatccattttgtgccctagaaggttctaaatgaaaagttttggtaaaacccttcatttatttcatagctaagagaaagggtactgtttgaaaattaatttttataaataattgaattgttcctcctcctagataagctcaagacactttgttaaatgaacacctgacaaaggctttcattttttctaattacaaattagagatactagctgggttgtgtctggttttttttcattgtttttgtttgtttgtttatctttgttgttgttgttttttacctcttgcagcagttgaaatgcatgtggtctttggttctgtatatttaagctctagtttattacttctaatctttaaaagatattaaatcatttaaattggcagacaccagtgtttgctggctgctcgaatattaccatttaataccctacattggagaattaaagcatggtgccctgctataggcaaagtttagaagagtcctgcctgtcatcttgatggtttccaacactgagttttctaattactatattttggtagggcgaaactgagtatgctgatggtttttgcagctatggtagtaacatttttccagccatctttaggtatgtttttcagtggaaagtttagcattggaagtttagggtttttttttttttctttttcttttagtggagtgatgtataggtattctattttattactcattggaaaattatctatttgtacagtgcctaaaacagctgaacacctagtaattgttcagtaaatgatgatgatgatgatagtgatgatgatgatgattttctcttcaaattaaggacaatgtcaaattaattcttgttctctagcttctaatacagtatttgactcagcctccctaccagccacttgactttgctaattacttatgttgtaatcatttgatagtaatttgaattattctttttttttgagatgtctttgtattccttgaaagaaagttattgtttgttatatatcaaaaatttttagcaatctttagggtcttttttctctgaaaactcaagtttatttttgtctttttatcaaatacttttatagatttaggaaataacttattctagtttaataaattatacttggcccgttattgttactccctaatctttctttgtttctgatggggagaaaggatccttttagattctttttaagtcactctgatttcattctggaaagaataaggcaacatacatcaaatccttttgagaatattcaacatgagatagttttcttttaagtctgacagtggcaggccataatactactgaataaattcttaccaaactgaagcttctgggctcagtttcaatgttttatttagtattgttctcaccagctttcttctgacagggctcaatgaagatgttagttaatattcttgcacattgcatttggatgggtttgctctttttggtactgactctgttacggttttcacaatgacacacacttctgttggtttattactaaccatagttgttattgaagagaacctctctttcggcctcagtgatgtagtaaacggtaattttgcaatccttacaaattcacccttatacaatgtatggtacatttctgaacatggtaatttttaagtgctttcaacttgcaaagtagcaaattgatacacaggggatttccgacagcttcttctccagactgaatgtcactcatgggattgtgattccatgtgaaataaggcaacattggccggaggagctgccatctggactttgacgacgaaggcatcatttacacagggctggcattcagagccagggtcacaaagcagctctttccaggagcaaaatgaagttgtcaagcaagtatttgctctgactctgccaggcaccattcagatatgacaaacttgccttcctctttttattacagcttactaattctggagaaagatggaaatttttttttttaatgcgtgctcttccaaaggtcaaaacaattttaaacaagggcaggcacagtcctgcaataaaaattcagcaatctagttgtgcaataagtccgtgtaggggctgagggaagtgtcatgtttacctctctggaaagggcactgtaatcaaaagactgatggcaagaggagctttgaatttgttgttctatttctcccacatctgcatgaaattgtgtctttgaaactatatattatggagatgagtgatactggagagaaacacatgctctgaagtaaacagaaaaatacagcagcataataaaatgctttgcccacttttacagcctctgtggtggccatgaaataggagatgccaactgatggggatgtgagtggagctgtttgaggggtggatttttccccattactacacatagatgcttgcatctttccctaactgtgtatttccttaggtgggtaatgacagtcagtggaaaagccagtgcctgctgttcaaacacagtgtggaaaaaatgaaattgaaaacagtggtgatgagatccagttctccaatattcctctcctagacagactaaaacctttcttctcccgcagcgttagcgctcactctggtcctctcagctgcaaagcagatggatttctttgagaagtggtcagaatttccttgattcaggagctggacctcacgccctcctctagggctccatcatcaccacacaggcacacggccacacctgagtcccatacacagagaagggtggtcatggacaaaagaaacagtggacaaagttttgtgtatgacaattcctggtggctccaatagcaggatggatggatttgggctattaacagaggtccaaaatcccaaaaagtgaccacatgtagatgagacagtcatgacttttatgtgcatttgaattgggcttgagatacctaagtggggatgcctaatcgacagttggatatgtgagtctgagtctcagaggaaagagctgatttaaacgtacaaatgagtgagtcctgtgtctactgaaggcctgaatatggatgagacagcacagaaagcagaagaagagggagcatagaaagacgggacttggaaagtgccaactttttcattgtttgagttaaaaaaaaaaaaagttaagactaacagaaatagcaaccagagaagtaggagaaatcaggaccagctctcgggacataggttaagtgtaaagactgttccaagacaaaggaatgacagggacaatattgagcatcaaatgctgctgagaggtctggtaaaataaaaaatgcaaagatctattggatataatgaaatggaaggaggagtagaccttaacaaagaccattttcatgtgatgattggagttgggtgtgtgtgtgtgtgtgtgtgtgtgtgtgtgtgtgtgtgtttccaagtaagataatcagtcttagatgccagtgggaggaatcctaagagaaataaagaataaataataatgtacatctcctgagaagatggagaaagggtagaaccctaccataagaccaggaagtggccagaggtaggaggaaaaactgctgtaagagacaggagaagatggtattcctacagacagaatggtgaggcatttctctctgatatcctgtatttttccatgaatttaaaaatgagatcagttgttgaagaatgaaaaggaagttcctgagagcatagacacaaatagatacatgtgttttgttgaaaggccaaagagtgaaaccattggaattgagtatatgtagcaccaccaaatgcagaaatctattaaattgttaagaatatggaactggagttcacaggagggagagagagagtgggactagacttatgtggcattagcattaccaaaggtgtgtattgtagtcatgggactgaattcatgaagtcatttaatatatactgaattattatgaatcctagtagctgcagagaatatatactgagttattgttatgaacctttgtagctgcaaagataaagtgagatggcttccacccgctgagtagtcgtcggtctagaaagaagctgacatttacacaggaaataggcagtgtgaccgaggctccaataagcaggacaaggttttataaatgtttgtaagaaaatgcacctctctttgctagaagaatagaatagttagaataggaaaacaatgtttgtatctatacataaagaaaaagcaggccagcaccgtggctcacgcctgtaatcccagcactttgggaggccgaggctggcagatcacctgaggtcatgagtttgagaccagcctggccaacaacggtgaaaccccgtctctattaaaaatacaaaaattagccaggcctggtgatgggtgcctgtagtctcagctactcagaaggctgaggtaggagcatcgcttgaacctgggaagcggaggttgcagtgagccaagattaagccactgcactccagcctgggcgacagaatgagacttcatccacccctcatccctaccaagaaaagaaaaaacagtggcaaacttgatgaagaaatgagaagaatatttctgttaccgagaagaggtgtgaataatgttgttacaatatatgcaatgtaaagaaaatagacatgtggcaatataatccaattaggtcacttctgaaaacataatcagaaaaaaaaatcatagaatcatgaaataataaagccagaaacagagatcatcaaagtccatgccccatgttagacagcaggaaagagcctgaggaagaaatggaacgttatgatcataatggaggtggaatagagtccagatctcctggctccaatttcagtgatcacctcactcactgatctctatttcacagccactcttgcactggctggaatatgcaggatctgtaatatccttgggaaggaacagaattctctggggtccactgtcaaatagtggacatctgaatcagctgcttcaggtgaggtggtgctcagccccctgcctctgtccacagatagagaacagagttactttgtgagcctctaggctgtcaacattacccttgcagatctgtaggatttatgctatgctggagacataactgccgacctagtgggaccagagtggaggtaggaaggcttccgagtctctctttgtaaagcctgtgactacgagccaggctttaacagaatccctgctttactccctttttgtgggttatgccatgtacctctatagtctcccaagaatctgtcaagatatcagcttttattactcattaccctaaacctaaagaagacagacaggacagaacccaggaaatccaataagtggatttcccagaaatgaaagtgcatagaacctagaaatccttatatgtgaattttcttgtgaataaaaagtataatagaaaaacaatttggtttgacaaatatatacagaaatcttttgtttgtgtgtatgtgtgtttatttaagattcgcctgcttttgtaaatgtaatcagctacatacaatttttaaatttctcacttccgtaaaattgtctttccttgggtcatgattctgaacactgatataactgtacagcatgatagatagggtaggtgtagaaaattgtactgaattgtcattgagtgttggctataccagggtctcccagaatatagaaagccttgtgctagttagaaaatgggctcctcttctctgcaggccaattagtttcagccagcctcatgagctgactgcatactgaagtcagccccaaatcctgccctcccaaatcaacctgcactaccatatcttaagagtagactgtcaaaacaagtccctggtttactcttttttttgagacagtgtaagacacaagtagattattgagcttcctgaaaagatagattcagagtaattaaaatttgattttaatgctgctaagaaaagaatagagatgtgatataaagttatgacacaaggaatacaaataagattatcacttatggatgatggctgtttgaaagataagcccaattatgaacaccaatacagattctgcaaatgtatgttcagagatggttatataagtggcataattgctgtaccttttacatagaaaaattgcagctattctttaatcaactgacactgggagaaactgattaggtgtgataaagttgcctcaggtgaaatccaatttcaactgatagactgaggcataaagaaaggaaaaaatacaccgaaacaccagaattcaaaatgtgcgcatgatttttaaaatttattttctcttttttctttttttaaaaatgtgtttagatatgaaaaaagaaatagaataatgacttgaattcgtgcatctgaaaaatgtttattaaccacctaactatggacaggtgctatttatcagaaaccaaaacaacagctcaactctactggatcataaactctagtgggaggggacaaaataaacaataaacaaaacagtatctaatattagaggtggataaatgcaaatagataaataaagtaggataagggttatggagtgaagcaaagatgctctttggaggttattaagtgaaagccagcctaacaaaatggcatttgaagaacatctaaggaaggaggatgaaaggtccttgaggatattaaggaaagagaatttcaggtggcaaaaatagtccctgccaagccctaaagtgggaatgtgcttgggtgtttaaggagcagcaagatggcagaccggctggaacagcgtgagcaaaagccttgaacaatgaaagaggtcagtgataaataaggaattcattcttcacagaaaatggggcgatgcatccaggcaggttataaagattaagagttgaaatcagagaggcaggtggttttgatgttttgagatttgcttcctaataggcatcttaatcaaattattcatccagagttgcaaagcagcaataaccaaaaacatatctgaatattgagtaatttgtcacattcattacaatcaaactgatatcatttgcctcgccagaaaaaaaaaaaaatgactaattgacataatgtgaagagctttgaagaattgcatttaataccagcaggttaatcaaaaggctaacgaaacaagttttagttaaatacatacaaggaaaaatgtattctgtgtctttcctgctgttgtcaggaaaaaaagaataagggcaaattttagtgatttcactgtttatatgtgtcccttttacccacttgaaaaatctgccacttattattgttattgaattttccgtcatcttactgctcttctgtgagattggaggactttgaatttgtgccacttttattaactgcttgtgccatcgagaaaggctttagcatcttagtttcctgggaggaagaccgggtaatggatgaataatgtgtgactctgccagtttgatgtgttataaacaaaaaaaggatttgtgcccccactaaatagcaggcttgatatgagacctcaggttttgagctgcataagcagcgtcttgctctgctgttgaagaatggatgcatttttcagatagtaagtaacacatgactgtctggagagtaacaagtattgggttggtgcaaaagtaattgcagtttttgatgttactttcaatggtaaaaaccgcagttacttttgcactgacctaatagggttaaaggtcaaggctaagtattttaatgtcatcaattttattttctttcttaatgtgttaaatagtagaaaagaagaggccaggtcagaaagtctcaatattaaggcttatttgtctcccttgtccttttctggactctcctggtcgtgtcttcatcaaattgggttaagaaaccaaactcagcttgagatattctccaaggcaatgtttatgtggagttggttcaggccccagcacgttgggaagaagtagtaaatatcataatagtgattgtagttattgatcagtattggtccaatcatcagagctttgatctttccttctttgtcaatttcttttacttttgactacagattcattcagaactccaccccccgccaccccgccccatcttgcagaagccacactttctccttcatcaccctttggctggtctgtctctctctccttatgttcagaaggcttttctgttttgatcattcatgtttgctttcttatatcaccttaacctcttaaagcttgatcacctgaaacatgagtctgccgctcagatgattctaatcctcaaatctgatgatgtcggccaacctttacccttggaacactggaacatttacctttctgaaacactcaccgctcgtttacctgctagaagctggagtacagaatcagtgtccaggtggaactcccagtctgtagggaagatgagcacataaagtaactgcaacacaatacatgaatcagaggaagaaatgcaataactaagttctgcatgaactgtggcttaacacaaatagggaacaaatactagtggctgtgggaaatgagaatgaaagcagatttcagagaagtaacattcttcaaatcacgttgcctagacccttcccattttgtagctgctttcctaaattctttcttcctctcctgttgctgcagcaccctaagaggtggggccttagctagccatgtgccccattccacagactgtcccatgctcaggcatcagttgtcactgtggatgactcacagaattaaagatgcggttctggctgggcgcagtggctcacgcctgtaatcctagcactttgggaggccaagacgggtggattgcttgaggctaggcattcaaaagcagcctggccaacatggtgaaaccctgtctctaataaaaatacaaaaaaattatccaggtgtggtggcaggcacctgtaatcccagctacttgggaggctgaggcaggagaatcgcttgaacccaggaggcagaggttgcagtgagccaagatcatgccactgcactgaagcctgggcaacaagagggaaactccatctcaaaaaaaaaaaaaaaaaaaaaaaaaaaagatttggttgtaatctctctctctcttgaagtcgtaagtcccatctcttgtacatcctcatttccaagttgctatgtcagagggcttctcaaccagggtgctactggcatttgaggtgtgacatttattgtgcagaactatctaacacattgtaagacattcagctttcatgggacctgaggcactacatatcagtggcaccttacacatgtttccgaatcatacctgaggaggtagtgccagccccagttgagacccactggcacatcaaattcaccctctataaaattaaactgaaaaagtgttcatttcccccaaaattaacactctcctactgacatttctttcaaaatgttcagatttgcgtaatcgtgaaaccaagcatttaccactagctgatccatcaggtcaacacatcctactaatgtccttttatagtatgttttccctctgtctgttaggcagaatgtcacatccatgatactccaagtctttatcacctaatttgtagaatagttcctctatttactgttgcctttcctttatgtcacattgtataataaaatatcaccttgaccatgcctctcccttgctttaaaacctacagtaacagacttcgactatacaattaaggccaaatagatacaacaaaagtgctcccccataaacatttttaaaatgcataaggccaggcgtggtggctcacgcctgtaatcccagcactttgggaggctgaggtgggtggatcacctgtggtcaggagttcgagaccagcttggccaacatggtgaaaccccatctctactaaaatacaaaaattagccagatgtggtggcaggcacctgttatcccagctactcaggaggctgatgcaggagaattgcttggacccaggaggtggagattgcagtgagctgagatcatgctattgcactccagcctgagggacaagagcaagacttcgtctcaaaaaaattaaaaataaaaataatttttaaaatccttttaaatgtatgattgagcatgcaagaaattgaggaagatccttgaggcctaaaatgaagaaaaatcatgaaccaaggttataaatgaatgccaaagccagaagctgacctaaaggcttctgtcagttccatgcaaccagcagcttttctttcagtggctatatgaggaagaagggtccatgccaagtaataaattatatcaaatatccctgtatggaaaacaaaatccagggggttagactctcaatgaaaaacaaaactgaaaatggaaaaatccactctacaaaagaagataatgtaaaaattttgattatctgaactttagctcagagtacaaagaagaaattatcccttgaagctatgtaatagaaagccagttctgatgcatgtttacagcctaacttcacagcatttgaatggttggagaaaactcaagctgaaaatatattttaaagaggtcccagattggtaatgtctccatgtatctgagaaaagcaaatgcagatgatctgagagagacataccttctactgaacctcacaggattctcacagacatatttccaagaaacatgatctcaaaagaaaaaataatcaccaaatgtatggggaaacaagatactgtaattgtgaatcaatagagataactaatagcattttcagtcctacagaatcttcaggtattgaaattattggattgaaaaaaattttaaagagaaaagtggatatactattaaaaataatgggtaacatttgaaaaagaaccaaataaacattacaggaataaaaacataatagataaaattaaaagcttaatgttagagataaatagcagtttctacccagctaaagtaggaacaatgaaattaaaaatagattctgaagaaatttcccagaaatctgcccagtgagagttgtcaaatatgaaaaataaaatattaaaagcaaggagattagatcacaaccaatcaatacatctctaattggagttgtgaaagaagagataagagtggtgaggccttattttggtgaatgatggctaaaaattgaccagaaccaaaaaaacatgcaaattaagattcagattaaggcatcatagtggatgtaagccagaatgaaagcaatccccagctagacagaaattacagattatttacaaaagaattgaaattaaactgaccattgacttcttgacaatggaaccctgaagaaacaaactattgtgagaaaataaccattgaccttgaatatgccacccagaaaaaaacacatatataaagtctaaataaagactttttaggacaaaataatgataacatactaccctctgaccctagagaaaaaaagatctcataagaatagtctgagatagaaaaaagagggaacaaagaaaatagtaaaatgtcagtaaatctatgcaaacattgacaatattgagcaataaactttaatttgtgatatttaaggaaaacaagatgaagctaaaaaatagatgaaataccttatatgtaaggaacagaaacaagctataaaattgctgtattgtttaggaagagaataaatatactatgttgagacactgttaagttaaatatgaaatttaaactttctagggtatctactaaaagaatgatatttaagagaatgcaaaattctaaaccagtagaaaatatatggaatgaagaaaaactatcaattcagaaggaagaaaaaatacttaaacattagtaacaataaaaagcaaacaagagagaaaaaaaggtacaaatatttggaaataagtccaagtcagttatcacaataaatagactagactctccagttaaaagataattttagacaattaaaaagaaaaactatgtgctgtacacaagagatattaaaaacattaaggacaccacaaagtctgaaagaaagatgatagaaaacaaggccaggagattacaaattccaaaaagctattgtgagcctattgatacgaatgcaaatgaaagagaaaaaaaaattacaattcagagcattacaatagcataaaaatttccaaattactgaaaatacctaatgctaaacttgggaagattgaaagatatagtattatagaagaagcttttaatattgatgtctcagtaattataggtcagaagcctttaaaaatcattaagtgtacagagcagcagtatccaaaagaactttctgaggtgatcaaaatattttctgtacaatatggtagccattagcacatatagctagtgagactgaaaaactaaattttaaatagctgcgtgtggctattggttacctactgggcaacccagataggattaaatagcataattaataactgtgagtcaatgcacacatagtactattagaaaataaatattttttcaagcacatgtaaaatgtttttgaatattgaccacagactcgattctttaaaataaatctcaacaaatttcaggttattggtatcataaatcctgttttctatgaccaattaaattttaaaaatcagctaaaaagacacttttacaaaaaaagcttaaagcaaaacatataattagacattttaaaaatacttctaaataatccctgcactgtgggagactgaggcgggcaaatcacgaggtcaggaattcaagaccagcctgaccaatgtggtgaaaccccgtctctactaaaaataataataatcaaaattagtgcatattatcaaataatgatgacagcataattcaaaacttgagggatattcctaaagtggtattttgatagaatttatagtcttatgtgtatagtaaaagcttagaaaggctgaaaattattgatccaagcatccatcttaagatattagacaaagaagggaattcttgtacacttttggtggggatgtaaattaggacgaccattatgagaaacagcatagaagttcctcaaaaaataaaaatagaactcccatatgatccagccatctctctacctgctatgtattttttaaaactgaaatcagtatgtcaaagaggtatctgcattcccatgttcattgcagcattattgatagtagcccagatgtggaatcaacccaagcgtccatgaatggatgaatggataaagagaaagcaggatttaaacacagtgatttctggaacacagaagaacatagaatacattatgttgagtgaaatgagctaggcacagaaagacaaataccacatcatctcacttatatatggaatttttaaaagttgcactcatagaattagagagttgaatggtggttaccagaggctagggaatgggaggttgcagagttgttgatcaaaggatataaaattttagttagataggaggaataagttcaagagatctattgtacaacatgatcattatagttaatacagtgcattgcattttgaatattgctgagagtacacaaaaaatgataagtacgtgaggtaatgcgtatgttcattagctccactgagccatttcacagtgcatacatatttcaaaacatcatgttgtatgtgttaaatgtatttaatttttatagatcaattaaaaactattttttttaaaaagaatagactaaaggattataggatatatccaaaggaagtagaacaaatgaaatgcatgtaaaagcaggaataaatgaacaagaaaatcaaccatacagtaggtaaaaatcaacaaatagatttttttttttttttgagacggagtctcactctgtcgcccaggctggagcgcagtggtgagatcttggctcactgcaacctctgcctcccgggttcaagcgattctccttccgcggcctcccgagtagctgggattgcaggcgtgcaccatcatgcccggctaatttttgtatttttagtagagacggggtttcaccatattggacaggctggtcttgaactcctgacctcctgatttgcccgcctcagcctcccaaagtgctgggattacaggcatgagccaccacgcccagccaacaaattgattttttgaagagactaacaaaatcaataaacttctggctagactggtcagaaaatagcaggaaaatatattagtagaaatgaagaaaagggatataaacacaactatttcccaatatatttaaatatttaaatgcaaagagcaaattcatttaaaaaaaacaacatctacctggaatataacataaattagaatataaacttatagaaatggatataagaataatcttataatgaaagatactaaattatatgagcctcagatagtttaccaaataattccaacatagccccccctaccattctttgagtccagtattaacttgataccaaaaacataatgatagtacaacaaagggaagttataggccaaagtcattcatgaatacagtggcaaaaatcctaaacaaaatagcaaagcaaacccaaccatatgtatgaagaatgatttatcacaacaaagtcgatttttttaaaagtactattattagaaaaaatctctgaacgctaaaaggagaaaaaacttttatcattttaataagagcagacaaaggattgaataaaatttagtattgattcatgcaaaaaaaaatcctaacaaatgagaaatgacaaatagcttccttaaacataaagatgaactattcttaacaggtgatagcagcatctcaactcaatggttacacataaaagcgttttctttaaaatcaggaagcacgtaaagaccgtcatcacaacttagtttaacattgaactaaatggatcatatccactgcattaggacaggaaagaagacatatttttataatagatagaggttggaaaggaacaactgttgttaaaagaataagagaaacaaaaagaatcaaagaaacaaatagcatatgtttccattccatcactttggtattaatcacacttgtttctggagaccatggtgtaaaggaatgagccaggattactgaagggtcctgcagtgccagtgaccacaagacaagccagaaccaagttaacttagagtgaattggcctattctttaatactgctcagaattacaaactcccatataatctgtcacttaaattccattcaaattaataaaatctaattcatttgaataagacttaaagtgatttgattctactgcatcaaattctgctcagtggaatcagtccttgattgaaatctattaagttcaattcagtaaaataaatttaaatattatgcaatacaattaatttttaattaattaccatttcagttcaggtccattttgatctgaacttcaattctacatttctaaatttggtccctattcaaatcaataaaatgcagcaaaatccagtgtaattctaaaagatacaacctgaagctaatcaactgcatttatttctattcacccctaatcagatgagtttagtgacattcaatcacagaaagataaaatgctcacctttaactaccaaattgaatgtttacattagaacttcagaattaccaggttttcccaaactcacatcaccatctgcagtagggactccacaggattttatcttgactcattctttgtttggcttatatattaacatagaacaatgtagaattggatggttaggaaacaaaagagaatattgctatcctgtttaataagctgaaatcataggtaagttgagataatagacttttgcatctatgagaatgccaatacatgattttttattttatttttaaagttcttaatttaaatagtaaaagacaggaatttttgactccagaccatggttataaaactgagaaaaaaagtattaaaaggactgtattattcagaaaaaaataattgggaattaaattgagatgttactatagtaacaccattatcacctctttgtatcttaccaagcaaacaaggtcctggattggtatcccaatggcacccagtcatctgggcctctttgtttctttatagatgttcccaagtgtccagtgaactccacctaccactgtccttttcccaggtcagtatatggcagactggtctgatggtaaggatcacagggacactgagtctcaaactcttcctctgagattcttattctacaggacaggggatctatattgtttacaagatcttagtggaatcatagggaaattgaaaacccttccctatacttacctcccacccgtgggtgaaaaacaaaaaaatcagaagttattactccacggcttcacctcccccacttcatcctcctgtaaggatcctgagacttcagctaccatggcccagatcttggaagtgattctgtgcggattttccacatgtaaaagaagaggaagctgtctgtatttaagccagagaactttaggactagtagcctgtttccatttccagtccctgggggaggggttcccatcaggtttagctttaagcccctatattcctggaagcgtacacatccatactggggaaaacaagaaaattctggccggcttgatcttccaaattacagctatcagatgatttggaggactctatagaggctacagcacctccaaattccttctctgctccatcccatcctggagattattataaaagcttttacctttcttgttatctaggacatttgcactggaaggaaagtttctcacaggtgcaagaatgttttgaatggtctagaattgcaccaattaaggatgcctatacttagtaagtgtatcatcaccattcataacttaatatggattttgtaatcagatcagagtgctcagctgaaatttacttataaagtggagaaaaaagatttggtagtggtaagaaaggaagagagaaggaagtaggagatttttctgagcatgagtcgcttagaaaaaatcctgcactgcaagggccttcaaataaccaaatgttaccagagagcagagcctgggaaggactgccaatgagctgccggcaggggacactgggaacaatagtgaaaagcgtgtttgtgctgcaagggtacctgttctatttcctcagctgaagagcccccagggactctttaacagaatttgtagataaggttgtaattgtacatatgataaaactagttctcatcaagccaaaaagatgcttttacgttttcattttggagattatatacccttgtggtgttgtttttaatatcctatagaaacagtgggaatgaaagaaattaaatgtcccagagactgtgctgggtcttatctcagagggcgccaggatcatatttatttaagcagcctgttaagttactctgtgtagcccagaagttccgaagaacacattttgaaaatcacaggtatgcacctcattttcatcaagcagtccccaagcattcgcccttgtgcttctgaaacaacttcttgttattggtgaaaataaataacagaaatctattggtttctttttctttctttctttctttctttctttctttttttttttttttttttttttgagacagagtcttactctgtcgcccaggctggagtgcagtggcacaatctcagctcactgcaaactccacctcctgggttcaagtgattcccctgcctcatcagcctcctgagtagctgggattacaggtgcacaccaccacagctggctaatttttgtatttttagtagaaacggggtttcatcatgttggccaggctgattttgaacccctgacctcaggtgatcctcccacctcggcctcctaaagtgttgggactacaggcgtgagccaccgcgcccagcttattggtttttttaagtaagtcttggaaaactcctttcctttctagcctattttctttctccctttcccagtttaatcatccacaccataataaacccttcaccataataaaacttgatctgaagtgagtacaaacagtatagtgattatatttaattcatttcatatttggctgttttaatacaatatgccttactttgataatttagctctagttaacttagaatgccattcatcattacctaaccttgttgcagtgaccatagctacttaatatagttaaatacaatcttcatattctgaggttagagaagttcttgaactcttggaaatagataattcagttatttctttcctcaccactttttgcccttgtcttttaaaaaagctttccatttttattgcctttaactgctattccccaaagccaattaacaggtaaataatgatttgtaaagctaaaagtagcatttcattagcatagcactggaataagggaattctttgctcaaaataaattgaaccgttctcctcttgctgaatataaaatacacaacaaattaataatttattttagttacagtgatttaaccaaattagccaatgctaataacaaagtctacaatttcctttctctctggaatacgtttttcttattggcattcttttgcagtagatgtggaaagagctaagttaagcattttgtgctgtattttaacttattttcctaggaaaaagaacagaacaacatcaattttgcatcagcctcactgggggcattcgttatatgaagactaaagtattgtgacttgagaaagagtgagggatgggagaagaagctgggaaaccaggctgctcttgccaggtcactaacttgccacctccttgcacctgtactccttgcacatggaggaaatatttcagatcatccccttaggtcccatcctgttgtgtaataagagtccctctctactgtaagctgagggtctgccatatgagattagcacacagcctggatcccatgcacagctcagggcttctactggaacacccaccgtaaccgcccaaggagttcaccttgcccgctgcctagacagagtcgattcatcaagacaggggagttgcaatagagagagtaactcacgcagagccagctgtgcaggagaccagagttttattattactcaaatcagtctccccaagcatttggggatcagagtttttaaggacaacttggcgggtcggggggaagccagtgagccaggagtgctgattggtcaggaatgaaaccacagggagtcgaagctgtcttcttgcacagtcagttcctggatgggaggcaccagatcagatgagccagtttattgatctgggtggtgccagctgacccatcaagtgcagggtctgcagaatatctcaagcactgattttaggagaagtttagggagggtcagaatcttgtagcctccagctgcatgactcttaactataatttctaatcttgcggctaatgttagtcctacaaaggcaatctagtcaccaggcaagaaggaggtctgctgtgggaaagggctattatcatccttgttttaaactataaactgtaagtttctcccaaagttagttccgcctacacccaggaatgaataaggacagcaaggaggttagaagcaagatggagtcgattaagttagatctctttcactgtctcagtcataattttgcacaggcggcttcaccactgcccaaacaattcaacaatgaaacttcctttcctgggcttctgagcactctctgaaggtacagtgggaaccagctgtctctcttcttttcccctagagtatgttccttgtagtctcattctgaaggtaaagctgattgttatcttctccttttactgagaatgtcctaatttttacaaagaatactgggccacacacagctctctgattcatgcaaattattactgtctgcaatgaaaatgaaacacagtgttaggttgtttctactgatcactcaaaggaacaatcataaattgggcagagattctgagatatataatctttcattggttatttgaggtatgggcaggacaaaggagtcatctgctagacaaacctttaactccacttttacaggtgcccgatttgtttcttctcctccaccaagagtgttagtgtcctctagtttccaaaaacagtgatactaaccaaaaattcctttgagagaatttagcatgaggtcagctttttgaatgcaatgcaaaaaatgaatatgataatcagttttggtaatgtttctatattttcagggtcaggctgtggcctgcccagcctcaaaggcatttcatgaggtcaaaatggaaccatctacctttgtcctctctctataacatggccagagatggaatcagccaagacctagtgtagcttttgggccaaatgaccttaacatttctttcggtggttgagatgctgtggtttccataaatgggatatttcaacgcttatttttgaaactctagacttcataaggagaaaaatttattattggccatgggaagcatcagagaagctggatgctttaccacttaccctgatggaaaaagaaaggagaagcaaatgacttaaacatagaaagcaaacacagcccccgcatgctgggaccaggcacaggtggacagaagacacagcttcagggtggacctttatgtcagaaagcgggcatgtttctccctttggaacagggtactgagctctccctcttgactgtttaccagattaagtcaaatatactttctttaatgtgggtgccaaaaatggtcatgccaagggaaaataataacttccaaattaagtcaacacacagaaaaatcaagaaatttgtttggagggagagaatacctgaataactaactcattttcaaattcagagggcttgctcattcattacattcatcctggactccagtccctgttcattctcaactttaaatcacccacctgttaacaaaattattcttgaggaaaactactggaatatctgagaaagtaccacagtatttttttgcataattccaatatggtccctactttttgtattgtttgtttagatattgtgactgttcacatggtaactttatgattttcctcacctttatttctgagcactcatagagtcaagtgtacacttaacatcccaagagggtggatgagttattaccatggaattttaacccatatacccagatttttttttctttttttttgagacagagtctcactctatcaggttggagtgcaatggcgtaatcttggcccactgcaacctctgccaccgaggttctagtgattctcctgcctcagcctcccaagtagctgggattacaggcacctgccactgagcctggctaatttttgtagttttagtagagacggggtttcaccatcttggccaggctgatcttgaactcctgaccttgtgatctgcccacctcagcctcccaaagtgctgggattacaggtgtgagccaccacgtccagccccagagattttaattgactggctattttggcttactggctgacattacctctgttagattccactcattccccagcttctggcaaggaacctctgttctcttagcataatgttctcaaggttcatccatgttgtcacatattgcaaaatgtcttttttaggtctgaataatattccattgtatgtatacacaaatattatatgactctgcttatatgagatatctaaagtagtcaaatccagctgaatgtggtcactcaggcctttcatcccagcactttgagaggcagaagcaggtgaatcacttgagcccaaaagttggagaccagcctaggcaacatggcaaaaccctttctctgcaaaaaatacaaaaattagccaagtgtggtggcatgtgcctgtagttccagctactcaggaggctgaggtgggaggatggcttgagtccaggaggtcaaggctgcagtgagttatgattgctccactgcactccagcctgggtgacagagtgagaccctgtcttaaaaaaataaataaaatataaagtagtcaaatcatagaaacaaagaggtcaccaggggctgggaagacggggaagtaggcagttgctaatcagtgggcataaaagcttcagttaaacaataaaagtaagttctagaaatcagccatacaacaccatatcattaatgctacattggacactttaaaagttgtcaagagagtggatttaacattaagtgcattctcatatgctaaagtcatattaagaataagaaagagtcatccagtcagacgggttggctcccacctgtaatcttcgcactttgagaggccaaggcgggtggatcacctgaggtcaggagttcgagaccagcctggccaacatggtaaaaccctatctccactaaaaatacaaaaattagctgggtgtggtggtgcatgcctgtaatcccagctacttgggaggctgaagcaggagaatcctttgaacctgggaggcagcggttacagtgagccgagatcgtgccactgcactactgcactccagcctgcacgacagagccagactccatctcaaaaaaaaaaaaagaaagaaagaaagaaagagtcatccattgtcagggtcttcctgctctctgcttccattctttccactgcctaccacgtctaggcttttcttcccgccattcacctgaaactcctttcatcaaaatctctagtgaccttccagctgtcaaattaaaagaaaactcttagttccccatcttaatagacttcactatgaaatctgatggtgctggcccctctgctctctgggaaatcctcctgtgtttttctcccatcaccctggctgccttcgttcttgcactctgctatggtcatctccatctctggtacggtttggctgtgtccccacccaaatctcatattgaattgtaatctgaattgtaaccccatgtgtcaagggggggacttggtgggaggtgactggatcatgagggctattcccccatgctgttctcatgatagtgaggaagttctcacaagatctggttgtttgataattgcctggcacttcccccttcttgctttctctctctcctgcccccatgagaagacgtgccttgcttacccttcttcgtctgccatgattgtaagttttctgaggcctcctcagccacacaaaattgtgagtcagtcaaacctcttttctttataaatggttaaagacccagtcttggatcattctttatagtagtgtgaaatcattcttgggttttggtgggttttttgtttgttttgttttgttttgtttttgagacagagtctcgctctgtctcccaagctagggtacagtggtgcaatctctgctcactgcaacttgcacctcccacattcaagcaattctcctgcctcagcctcccaagtaactgggactagaggcgcctgccactgtggccagctatgaaatcattccgtttttgaaatgatgttgtaatctaaaagattccagcagcatttctcccacttccaatatgttctggtttgccctgatagttcctaaaacatattttcagctcagaaaatcctcctgagaaccagacttctacaatcaatttgtacattttgtgagcaaacccattatcttttcttcaacattccctagacttttgatgatgatcttccttccctgtgccctaccttcatggagcatagtaccatccccattcatacaaaccagaagcctggattaatccacagcactccctgcccatcttctcttctacctaaatcccaacagtcccagccagctataactcctgaaccttttttgtgtgtgttttctcttctcctccatttctactactattttattacttcttttctctattaacataagagcatcacatctagcctccctgaatccattttgcagaaatctatctttcatcttcctgttgatcttttgaaacacaaatttaatcatgctagttccctgcttaaaatcctttactagtttcccattattttcaggataaagttcaaacgtcttaaattgggggaagataaacattgaaaagaaaggataaaccaatgaaaaataacttcttacttggacaaaggtattttgcaatgtgaccttcatctgctgtccatctatctcttactatctactactgctcctctcagcacatctcttcagcccaattctactacatatgaatatagtcctatacatattttccaaatagaagtttacctttctgtctttttacattctgctccatttgcctaggaggtcttacctctcttatgtccttattgatctgtgtaatgcatacttgaccttcaagatgcagctcaactattttgcctcctctgggagaccttcctttatgacctcatttgcctcccccactctcctctgtgttcataatactgataaaactgttctccaatctgtatctttttcttccattctgttgagttgcttctaatgtttggcacattgtgggaacccagtggatgtttgatgattggatgaatgaatgaatgagtgactattaggccaaatgataaaggagagttgggggctaatctgctgtgtggttaaaagaactacttaactcttctagacctaaatttctttacccataaaattaggaggtcatactcaaaaacagtgaaagtttgtgcttagctccaatattctatgatctccatgacttagttcacaaaaaagcatgaccagtcacgagaattgtatggtgtagaatcagttcatggcccatacaccttcattgcggactgaccgcaacttggcttccagtttactaaatagactcctaaatcacagaagtttgaatgtaaaattgtcttccaaggagagaggtacatattcccatgagaaatcttaagcttaacactcccactgatattttttatcaaatatttctactattgacataaatttacctttatgcttatgtttatatttatatacatgtaaaattgtgatatatacttttgaaaactcgtctaagcttaaaagagccttttgaagtatagaattaaaagcttttttaaaaaaaacaaatttatttctgtaggtttttgggtaacaggtagtatttggttgcatgagtaagttctttagtggtgatttatgagattttggtgcacccatcacccaagaagtatacactgaatccaatttgtcatcttttatccctcacccccttcccaccctttcaccctgagtccccaaagtccttgtatcattcttctgcctttgcatcctcatagcttagctcccacttatgagtgagaatatacaatatttggttttccattcctgagttacttcacttagaataatagtcttcagtcccatccaggttgctgcaaatgccattaattcatttctttttatggctgagtagtattccatcatatatgtttgtgtgtgtgtgtgtgtgtgtgtgtgtgtgtgtgtatgtgtgtgtgtgtgtgtgtgtgtgtgtgtatgagaaacagtttatttatccattcattgactgatgggcatttaggttgcttccacatttttgcaatggtgaattgtgctgctataaacacatgtgtgcaagtatctttttcgtataatgacttcttttcctctgggtagatatccatttgtgggactgctggatcaagtggtagttctacttttagttctttaaggaatctccacgctgttttccatagtggttgtactagttcgcattcccaccagcagtgtagaagtgttcccctttcaccacattcacaccaacatatattattttttgattttttgattatgggcattcttgtgggaataaggtagtattgcattttggttttgatttgcatttccctgatcattagggatgctgagcattttttcatatgtttgttggccttttgtatatcttattttgaggattttctattcatagccttagcccactttttgatgggattgttttttcttgttaattcatttgagtttgttgtagattctggatattagtcctttgtcagatagatagactgtgaagattttctcccactctgtgggttgtctgtttgaaataaattgacttttaagagggttgagtgatgttcagactatcagagtattcctggggaagtgggtgtaagtgtggcagtctaatgactgaacccaggtctgtttctaaatatacctttgccttttcttgtagatggaagcccttacacttggtgggttggcaaagccaacgagaagcactactactggggaggctctgggcctggaatccagaaatgtgcctgcggcatcgaacgcaactgcacagatcccaagtactactgtaactgcgacgcggactacaagcaatggtgagtgcctgcgggcagcacagccaggctcaccctcccagtgtgcctttgtgtcaaactcatgtgatagaagaaagtttgaaaagtgctataataatacgataatagggtagaaaggtctggaactaacccaactgacaaatgtcaggaacatactgaaaaatataaaagcagaaagaggtcagtgcgacaagggtatgcatttagaaactgagacataattgatgtgttcatattttattcagagaggaaaataatgagccatgttgtagacagtgatttgcattataaaatgtgctgtgtaacaatagagggatggctgggggcgggaagccagtgtgcatgagtgcaggcagtcaacagcctcctgcggggagcacaaccacctcctgcaatgtttgcgttggggatctggattggaaaaataggagagagagagagagaagggaaaaaacaaagaaacagaaaaaatcattctttgctcttgtcttctgtaagtgcttgcctgtctacttttctttcatacctggaattgtttataactctgatacaaatcagttcaagaaagatctattttgggtttcttcgatccctttgctggcttttgttctgccccgcagtgaatagctgggtctgtgtcagtaacagataaagataagatcagctgccattctttgtgaaaaaggccccagaagtttaggtggaagactataaacctaagtgtgattctttgcagaagcacatatccagtgccggctttctacatttttagaagtgttgagaggctccatttctgcttctgggcagctgtgcacatagccagtcatggtcatgaatttccccatatgcccagccatggttttcttcagttcacctatgtagtatgctatttacagggacagtttacaagacaaattcattccaccagttaaccaaaaacaaattctgagaacgtaactttatatgaatttcaggtaggatgtctgcttactttctgaaagttatatttcttctagtaaatataacaaattacaaagcctatctatttcaatggcttagaatgtgtgtgtatatgtgtgtaaaatacttgtaaatagctatcattaatctttaattatggattattgtaaagaagagatcatgataatttttaattttatttctttgaaagatgtatctacacacacacacacacacacacacacacactgtatacaaagattggaagttgggaatggagttaaaagggcatggtctttgaaattaaccttttattcattcgttcaatcattcattcagtgaatcatccaatcagtcattcattcaacaaatattgatcaaatacttatgagtcagcaactcttctaggcactggggataaaataccaaatgcaaagaacaagaatccctgtcctgactcacattcttgttcttgatgccttttattactagttgtgtgttcttaagccaggcagaccttctcccatccatttgtctatccaacattaattccctacctcttcaggaagctgacattgggttcagcctccccaactaggagaagtgggaacagagccccagctggttcattgtccaggcagcccagagtgccctgccaccatcaccttgtcccaccacagaggagagaagagggattcagaaagagtaagatctagtacctgcacctaagtgaacttcatttttatcagacatcatgctaagttctagggatacagtgatgaatggaacatggtatttgtcctcaggagctccaaaactagttgaaggaaacacacatgtgcacacacaaatagataacataatacagtcagtgttgtgaggaaggtgtgtgcaagatacaacaaaaactaatgaaagtggcggggcgtagtggctcacgcctataatcccagcactttgggaggccgaggccagcagatcacctgaggtcaggagttcgagaccagcctgcccaacaaggcaaaaccccgtctctactaaacatagaaaaaattagccgggcatggtggtgggtgcctgtaattgcagatactcgggaggctgaggcaggagaatcgcttgaacccaggaggcggagcttgcagtgagccaagatcccagatcgtgccactgcactccagcctgggtaacaagagtgaaactccatctcaaaaaacaaacaaacaaacaaacaaaaaaaaactgatggaagaaattttcaatctaactggaggagtgaaggaaggaatccataacgtcttggaggaagaggcataaacttgaaagacaaggaaaagcaagggccctgggacactcgcccttgcatggtggtcttggagaagaagcatgacggagctgggccaggctggggaactgtctgtgcagttgacagttttgaaaacattaaggccctagcatgacatctgtgtctaaaccctgagggctaccattagtagaattacaggttgaaaacatagattttttttttgagatggggtctcactctgtcacccaggatggagtacagtggcaaaacctcggcccactgaaacctctgcctccccggttcaagcaattctcctgcctctgctggcacctgccaccatgcccagctaatttttgtatttttagtacagacggggtttcaccatgttgaccagactggtcttgaactcctgacctcaagtgatccaccctcagcctcccacagtgctaggattacaaccatgagccaccatgcctggccaagatagatctttattttttttattttttatttttttttttgagacaaggtcttgctctgttgcctgggctggagtgcagtggcgcaatctcagtgattctcctgcttcagcctcccaagtagctgggactacaggtgcccaccaccatgcccagctaatttttgtatttttagtagagttgtgatttcaccatgttggccaggctggtcttgaactcctgacatcaagtgatctacctgcctcggcctcccaaagtgctgggattataggcgtgagccacggcgcccagtcacaagattgatttttaaagatatatattagcctctgaagccatttcaaagaacatgtctgaattcagatcacagattagaagacattccattccacccttattcccagacctcctcctctggcaagcttcaattgagttctaacatttcacagttactcagggacttggtcactgctggtgtcttgttctcttctggcttagcagcagctaagacatcccactcctttgcttccgtaaagtttgtctaatatttcataataaaggcactatagcttgagcaaactgaaaagtataatgaatatttttttttttaagagacggagtcttgctctgtcacccaggctggagtgcagtggcatgatctcagctcactgcaagctctgcctcccgggttcacaccattttcctgcctcagcctcccgagtagctgggactacaggcgcccaccaccacgcctggcttattttttgtatttttagtagagacggggtttcaccatgttagccaggatagtctcgatctcctgacctcgtgatctgcccacctcggcctcccaaagtgctgggattacaggcttgagccatcgcgcccagccatgaatgttttttataataaatagctcttaaaatggtcttccctttttagcacaagaaagaatgctcttggagaaatcttcttggtctttgaattcaccagcacctagcaaaggccctccttcctatgtggatgctttagatatttgggagtggatggggttgcttctagagacactttctaaagctctcaggggcagtgaagagaaagttgagcttgatgcgggtagaccttacatccaggcccagatttgccacttttgggggaggcttttaacctctctgaaatttaatttattatctgtataataaaaataaatcttggcaaatttttgtgatcattaagaatatagaatataaaagccttctataaattatactatatgggatagttatttgcaattctattgcattattttaaaatttattttctttatttatttattttgacacagagtcactctgtcaaccaggctgaggtacagtagtgtgatctaggctcaccgcaacctctgcccccagtctcatggctcagcctcccaagtagctgggattacaggcacgcatcaccatgcctagctaatttttttttttttgtatttttagtagagatggggtttcaccaggctggccttgaactcctgacctcaagtgatccatccacctcagcctcccaaagtgttaggattacaggcatgagccaccacaactggcccttatcacaattcttaatgattccaattgactcttaaatgaaaataaatgaaaacagagcgtggcaagtaggccccttcatgctcttgacctgctgtgtcgtaggcctcaagtctaattccacaacgccacatgcagatgttatgaaacaggctttactagagaaagttataaatcagggatcatcatcagaagagcaagtacaggtctccaatcccatcatccctcagggagacgtgcgaaagccaggctattccgctgaatgcaccaagggcattcgttaccaggaagcccctgcttctctcacttctcacaaagcaaaaatgacagcaactttgtcagtaggggaaaatcagatgcatggggcaccaggcagtctgggcataggtgcctgctgtttacaagtgttgtctgggagtcagagcccctccaggaacagggaggaagccagagccccttcttgaagctgactttgggtgtagtctctctaactaggagaagtgaggaacactgtccaggcaacctggagtgcactgtcacgatcattgctgttcagtttttttgtttctccaaacacagagaagggctgggagattatgggaaataaaaatgtagcacatacatccaaatgaaactcacatatgttaaaccacgtttgttgtaatgtcagggtaaaaataaaggttctattaaatctcatgcttttagatgctttgtccagttaagaaagctattttcaataatctgaatcacaaagcatcattggattaagatgaactaagaccaaaatgaggacaaagtacccgtgccacttcctttctgtgtgatctaagtcaggatatttcacatctttgttttcttatcagcaaaatagaaatagatagtatagtacttcccaagtcatgtaaggatcttggtaaattgctgtcataaatgaaagtttaaaattacagtgtgatatattatttttattattatttgaatgttgaatggaaccttagctaaaaattattttaaaatgtcttaaattacagatgcataaattggggccctgaaaaatgtaaattactttcaaaaaattacagtagaaatgaggagtagaaagaagaccaaagacacacatctccaaacacccaggccagtgttcttccacaatatcaggatcaaggaagtttttttaatattgtttttatctatctttttaatgatttcagaatgtaatttttaactagcttatatgtaagctttaaatttaaagcttaaaccacagaccacattatatgttctttttctaagaactctaaaacttagattgaatacttattcttatttactggtgtaaaatgcataaaaatggagccaggataaatgagattgcagctcagagcatgattgggtctcacaacgaagctgcaatggcctgtgagtacgatcaccatttcaataattgcctgattatctatgctgggagaagttttgcgcagttatttctgagattgaatgtaatttaacatttatgatttactattcacagcaatagtaaatattcccacctacagtgccagaattctaattacacgagtcttggtctcagctaagtggccactgctgggtaattcctggtctcttgcagcctgactcaatgagctaaatcaccatatctgaaattagcaattcgaaaatgaaattatcagggaaagaattgccattcattgcgtgagtacccttctcttattgtagaatttctggatagttatgtcctggccaagatgggcacatacatggtggaaaataagtgaagtgaaaagccgttagcacagtctttgtgttacaattagtcagcagttcccacctcaacattagaaaggccaaatactagccgttgtgctctctttcgctgaccctaaatggaattggcttgtctaacagcctttttcttcctgggccaaaaataatccatgaccaacttttatagcagctgaggggagttaactaaaaaatatcttcgatatttcaaagccagaaacatatttatttggttgggtcagcttactatccaacacctaattctgaatatttttaaaaataatcgttataattttttgtccttgtttataagaaatttgattgaatcttagtgacttttttcatgaagttttagactgcctcttactcaaagtgaaatatttatatatgcattctcattcgtcatgttgtttaaataatagtagttacatgtcagccactgttcatgtatgtttcatatactgtgtcatttaaacatctcattgactctatgccaaaggtactacatattttgtctttattttagaaatgctccagagagattaatttctcccacaaggtcatatagttaaaaagcagtagagcagagattcaaactcggggcaagcaactttagactcatccttaggaattacacaccaagactgtattagcctgttctcatgctgctagtgaagagacacccgagactgggtaatttataaaggaaagaagcttattggactcacagttccacatggatggggaggcctcacaatcatggcagaaggcagagggaaaagtaaagccacgtcttacatggctgcaggcaagagaacttgtgcaggagaactcccatttataaaaccatcagatctcatgagacttagtccctaccaggagaacagtatgggggataccacccccatgattcaattatctccacctggtcccgcccttaacatgtggggattattacacctctgggtgagatttgggtgggaacacagccaaaccatatcaaagatgtaagttctgtataaatttttcacctgtgtactatatacagcacaatttcattttttttccaatttttattatggtaaatacacataaaatgaactatcttaaccatttttacttttacaattcaatggtattaaatgcattcattttgttgtgcaatcatcaccatcatccatctccagagccgtttttatctagcaaaactgaaacgctatacccattgaacagtaattccccatttccctctcctcctagcccctggccagttaaccttaaataatgagttcagaaaatgtgattaaatatagagtttattccagctcaaagcctgaggatagccaccagggaaacaccaactccaagtgaatggggtcagctttccaaagtgggaaagttaaggtttcacttacataggcagaaatagagaaggttaacagggttgcaacatttgccatataaggccagcacagatgttacggtcatttgattggttacagtttgctatgttccaaggaagattgctttaacattccataaggaggggtaatggtctcgaggggtcttatttctggaaccatttggtcttttctaatcatttacaggacagaaatgaggaagagatttaatctataatcagagaagcagaagttgcagctgcacgtggcataactcaggccacataaccacatttctctcaaggctcaaaataatgtaaagttccaaccattttaagtttgaattatttgatttcacaccaccatcgttctattttctgtctctgtgattttgactgctctaagaacctcatgtgagtgaatcatatagtatttgtctttttgcagttggcatatttcacttagtataatgtccttaagttttgcctattttgtagcatgtatcaggattttccccctttttaagatggaataatattccattgtgtgggtagaatacattttgcttcttcattcatttgccaagggacacttttatttccacattttagtgactgtgaataacgctgctacgagcacggtggtacaatttctttttaacgtctacttttactcacctctgtagtgctcctgatttggtttctaaaaatctcttattttaattttatattaaaagtattcattatgacaaatacattcaaattattttctgaatgtgacctgatttcaaatcctagtcctattgcttgctagttcagtgaccttcagcaagttataaaagctgtcaatgactgtttccttaaccacagcatttaaatggcactcacagctacctcacatggtagaaagggagtttaaatgagaggatactcataagggagaaggcacatccatatttcactagtaaatgctcaagaaatattgattccaattacacccaagcacacacagataagggttagctcatgggttccccaggagcagcctcttcagtattcaaaaacaactcattgggcccctctgttctgacctccttgcctgcatgccttgctgccaccctgctgctgacactgccctcctgagatccttactctgccagctgcagctgtctcagcctgtgacagtcactgatgcccttatggagagatggagagggccccctactcaacctcagtgcagtggaaacgaagctatggctttcagcaagacttgacaaggattggagctaacagaaattttacactgagagaaacttgcaactgcttcctgaaatagccactcttcaaatccaggcaggagcccagcccctgagaccctgccaagctcccagcgaagcctcctatgggtctcaaccctgctttcattaatgaggctcctcaggcatttggatccaagccaaacctcctccaagccccagaggaagaagaagttcttcttcatcccaagccctacctcagttcctacaggaggaacatttgcttctcaggctgattgatagtgcaataattaaatcccttaaggaggaaattcccagcttaagccacaaaggtgtgcgtcaatcacctggcctgaacgggagcatcgctgtggtctgttctgggacctgggtttgttgagtgcatttctccaagctaagattccagtcttcagggacgcctcctgtaggacaacagtctaatgcaatgtgtgcagtgacaatatcagtcaagttttatttcatgatgtctcctcataaagagaagagaaggtaaagtcagcaagctcctccttctatgatttcatgggagaaaaagccaagacaaaaatgtaacacatgtccaaaggataaaaaggagcttccagggataagccagtttaaatccagatttattgggggaggaaggagcatctctcatactgctggcacaaggtcctgctaaatttacagtattcaacagaaaaatcacttcgcaaggaatattccattttaattcctgcccccaaattcaggagcaatatggaagtacttgccaggcatgtccacagatgaaaagccacaaaagtgatctctcaggaaatagagattttaccctcagtgacaacactggaaatcactttataaccactgcttccattccacctgctcccaccttagacaaacaaacacaaatggtttttacagcttcagatttttagggcccaacaacaggcagttcaatgaaggaaagataaagaaacatggacaatggatatttaaaaagaatttctgtttcataggttttaaaaaaggtttctaacatcagtctggaaaacagaaaccttaatacgagacagaaggtactgcacgatggcagctaggagcctggctatagagtcagaccatctacgtttatgttcctcctccaacactcagccagttagtaagacctgcctgtgcctcagttttctcttatctacagtggagatgaaaagagcgtgtctccagagatgatgtgagaatcaggggacccaagcaagctgagcatcattctttgtcctgtcagtggcaatgggactggaaacataacctttagtacaactgggtaggaatgtatgactgaggttacttttttgagggctatttgggaattgccatcaaaacttgaacactacattctttgactgaatccttcaccatatggcatgtaccatcttaaaaaaaatatatgttctaaggtggcatataccattttttgtagcagtcaaaaaaaaaaaataacctgtagacagcagaaatgtccatgaatagagtttcagaaaatgatgttataaggctggccaaggaatgaagtagatacataaacacttgcacagaaagatggccaagatgaaagtgaaaaaagcaagttgacaaatagcaggtataatacgagtctggtgtttcttttttaaaaaaaaaattatttaggctggtcgtggtggctcacgcctgtgatcccagcattttgggaggccaaggtgggcagatcacctgaggtcaggggtttgagactagcctggccaacatggtgaaaccctatgtctactaaaaatacaaaattagtcaggcatagtggcacatacctgtaatcccagccactcgggaggctgagacaggagaatcacttgaacccaggaggcagaggttgcagtgagccaagatcgcatcactgcattccagcttgggtgacaagagcgaaactccatctaaccaaaaaaaaaaaaaaagaaagaaaaaaaattatttttgagaagggtctcactgtgttgccccagctgaaatacagtgacatgatcttggctcactgcaacctcgacctccccaggctcaggtgatcctcccacttcagctgggactataggcacaaaccaccacatctagctaattttttgtattttttgtagagatgggggtcttgccattttgcccaggctggtctcgaattcctgggctcaagcaatctgcctgccttggcctcccaaaatactgggattacagttgtgagccactgtgcccagcctggcatttctctaatgtgtataatccataacctttatacatgcatacataatttctagaaaatctacaaaagaaacaattacaacgcaatagattaaggatgtaggactttatggaggacctggcttgtcccattgtacatcttataagctctttgaattttttgccatgaacacatttaacctgatcaatttaagtatttaaaaatagtttagaaattaaaataaaaaataagaatcctagccagcatcccagtacataataaaacaatactaaattcttattttaagaaaaatcagatcaaagactaattttcacatcatcaacaacaaaaccaaacaaagcatcttactggctctcctggccccaatattggaaggaatttctcagcaagctggaggattcctccgctcagcgggcgccgtgaaactgagaatattcataccattagccctgtaaccacatgcaaaacaaaatagttttttcattgatctgagttctgtggaactcatgtttgtgctcttaaatcttttggaatccttctggggaacaatcacttgacatcccaatactcagtggtcttattcgtgcatattataggaatatgatattatgaggagtactggtatcagttatgacaccagttgctaaactgaccagaaagattgttgatattcaaataaatgtgtgtgcatgtgcttgtctgtgtgtgtgtgtataaaataaaatgttaaaatggacagctatcaatatattttctttctagatacataaacggagatgccctcctgatctcatgaaggccattttcattaagttaagctttgttcattttcattcagttaagctttgtttaaaaaaaaaaaaaaaagatattgctttaccagtgatctgggtggcgggcgggggtgaagaagaagaaaaaaaaggaaactcttaattttagtcctatttagccccaaagcatgtgtttcagtattagagcatggccagagcagttttcaaaagggttacaccatcccgtgtacgttactccttatactgactccactgtggtttacttggcagatttgagctatgctgaagttgcctcttaacaggagattcctagagcgtctaacagctcaactcttttaggagcttaactactttttaatatgtgggtcagggttaagagcctcaggcaagggcttctgccctctttcgttaggaatttaccttggggatgaactaaaaaacttcaggaggctcatccaggcaggttccagatagctcaaattgcaaagctacctggaaagccactgtgtttctgcagccctgtgagtgaaacacctgttattggcaatggggaaggggaaatgtcctgtctctcccagttccccaaagaagcataaaaatgatgtattatatactgtctcagggacattttggtgccaacccacttggcacagcatagaatcctcctgtcacctcatggattgtatcatgacagaagggtaattgggcaccggagaagatgtcagcagagtgtcaatacggtttggccactgcccccaaataatattgatgacagcaaagagagcgattaatcaggtgtgatcctgtcaaatgttcagagtgtgctgtgggtactagaaatagatatagcctaccaacaaaatgttaaatggacttaaacaaaatagattatttagtcattttgagaaaagcagaactaagattcaaaagagctttttttctgaaaaaaaaaaaaaaaaatacagtgtatttcccattagtatttctctccacttgcttgaaaaagagggagagctgttatgttttctgaaaaaaaaaaaaatgcattctgcccaaaaaatcaatcatggaaaaaaaaagatcaaattaaaagagatgtcatgggatctaaagaaaagtgcagacgcagcaattgtaaaacacgttataattgtggacctatctgtttatttattctgtgtcccactgaaagttcaccctcacaccctccctaccaggccagccatctcctcccattaccccctcttgatattaatgatgctcgctcacttgtagtttcccacgtgtaaaaccccattgccttatgtattatcagttgttcaccattttccatacatggattctgtctcccctgggcctttcacagacacctgaccatctgtgaccatggcctttctcctagttctaaatctaagcaatggtattgcaacaatcttccaaaataacttccagccttaaaactctcttatcctacaactctgtctataactgtggccatcactggcttcacattagaatcacctggaaaacttaaactattacttatcattaggccctgcctcagactaattaaatcaaagtctctggagattatttttggccatctttgattttgcaatttcctgaggtttctaatgtgtagccaaggttaaaaaccattgatatagggctaggttaagctgcatataacagaaaaataactaaacaagagtgcttaaacaagatgaaagttagttcccatgcatgtaaaggaagtccaggctccttccagctctctgttctggtgttattcagatttgacatcctcctcaggatccaacatggcttctagagctccagccattatgcttccattccaggcagaaggtagaaaagagaggaaagagagcatgccttttccttccaagaatgactttacataccacttccatttacgtatcattggctggaactttagttaaccacgactagcagcaaagatggctgggttctgtagcctttaactgggcatgaatatgccttcctaaaaatgagcattctgttaccaaggaagaagaggaaaatgagcattaaggggcaactaagagcctctgtcggaagtgttaattcttcaaaggggccctgctagtctcctgttcacacctacagtaggtccctgtgatctccagaataaagtccagactcctgcagttctggagtccctcctcaccttgcattctctgctttacctcactcacactggggccattgtaaggatatttgtattttctcatcgctggtcctttacctacacctaaaataactcttcacatatctgcgttttcaacatcatctacttctgcagaaccagcgccagtgctgcttcccaaggaaacctccctgcctttgcccacacccctcatgtctagcaaaagtccatgcataaaaggcctgcttcctgagggtctcaaagcaaattacacttattttaaagttattttctctcttatctgcaattagatgcctgggtatctgagttctctctcaaattacaagcttcaggaggtcaagcaccatacctcatgtgtattataagtcattcatgcctgtcacttagcagctagtcaacatctatttgcaatgtaagccaaatgtgtagcactttagagaatccggttttttgtatgtatttataaactttctttttgcattgagtcataaacccacatagacatacactcatctctgctttaggctttgtagatggttttagttcacatagcaaaaattggaaagttactttatattcaatagtgaggtaaatcatccaagtcagtttttaaaaagataatgggtgtgtactaatatgtatgtccatactcacatagacactgacacgtgtatacaagtatattacatgcacatcctacattactaaatgtgatgtataatgactttattaatttttttggaagcatgctagttgtcttaggctaatttaatgcccggtattaaggtgaaatcaattactaccttttttcatcaggactagaggaggaaaaaaacaaacagaaaaactacccttatgcaggaggaataattctaaagacagaaatacaggatgtttggaaatgaccatctgtgacgatatttacctgcttgtccctgtcagccctgggaatggtgtgtctttaccttaggttactatattaggcagaataatggcccccaagatgttcacattctaattcccagaacctgtgaaggtcctacttcatgtggcagaagggactttgcagatgtagttcaaggtacagactttgagatggagagattatcctggactatcagtgggtgcccagtcaaagcacatgacttcttaaaagtgagaaaagaccctttcctggctgtgatcagaaagaaatgtgatgacagtagtaggctcagagagatgctatattgctggctttgaaggtggaggaagaaatccatgaactaagacataaaggcatcctatagaggctgaaagagacaaggaaattgactctcacagaggctccagaaaggaacacagccctgacacaccttgatcttaatacagccagacccatggtctgaattctaatctacagaaccataagataatatgtttgtcaggttttgtttttgttttgagacaggtctcactgtgtcacccaagctagagtgcagtggcgcgatcacaactcactgcagcctcaacctccctgggctcagatgatcctcccacgtcagcctcctgagttgccaggactatacgcatgtgccaccatgtctggctactttttctttctttttttttttttttttgagacagagtcttgctctgtctcccaggctggagtgcagtggcgcaatctctgctcactgcaagctccgtcccctgggttcatgccattctcttgcctcagcctcccaagtagctgggactacaggcagccgccaccacgcctggctaattttttgtatttttagtagagatggggtttcacagtgttcactaggatggtctcgatctcctgaactcgtgatccgcccgcctcggcctcccaaagtgctgggattacaggcgtgagccaccacgcccagcctacattttctattttttgtgtttttctccgcgttgctcaggccagtctggaactcctgggctcaagtgattcacccaccttagcctcctaaagtgctgggattataggcatgagccaccgtgcccggccacatttctgttgttttaagctacttcattggtgttaatttgctaggcagcaataaaaaattaagtttccttcctacggtggtgatgtcatcaaaaagaccccgtaaagctttattttttcctctcacattggtatagagtgaaagttcactggtaaaatagctttgcagaaaccttaaaaagtatgccttggccgggcgcggtggctcatgcctgtaatcccagcactttgggaggccgaggcgggcagatcaccaggtcaggggttagagaccagcctgaacaacatggtaaaacccgtctctactaaaaatacaaaaattagctgggcgtggtggcacatgcctgtaatcccagccactcaggagactgaggcaggagaatcacttgaacctgggaagtggaggttgcagtgagccgagatggcaccactgtactccaacctgggtgacagagggagactccgtctcaaaaaaaaaaaaaaaaaaaaagcatgtctctgaaagtgattttgtggctaacaccctgtttccctgcctgtccatcacttgctgatgctgagagcttccagcctacgaagaggatgtgcagggccttcgttcactgataaccagctctaccagtgaaggactggttgtctgtgcctacctgtgatcaggtctccttcaagtagatgattatatagcagttggcaggaattttttaaaactcagaaacattcatttatacatccaatcattcagctcatgtctgagtccctgctatatatcaggcacagtcagactatctggcagtccttggaaacacagggtgggtgggtagttttaagtcatatgcctcctgctgaaagacagatttaagaatgtgtcttcacaatccctacaccactgcaatttcacgtatgtgcttctgctcctgtcttttttttttttttttttttttgagatggagtctcactctgtcacctaggctggagtgcggtggcgtgatctcagctcactgcaagctctgcctcccgggttcaagcaattctcctgcctcagcctcccaagtagctgggactacaggcacccgccaccacgcccagctaattttttgtatttttagtagagatggggtttcaccatgttagccaggatggtctccatctcctgaccttgtgatctgcccacctcggcctcccaaagtgctgagattacaggtgtgagccaccacgccctgcctccttttttttttttgtttaacaggcagagaaatgattagataatgaagacgttatttattttttattttcataataatgaattaaagaggatcttatggacattctgagctttcccattgtaacagcctcatttatggcagacgccatttgcctgctgtccacaccgtacttaatttggcctcaatctgtatctttggtgtattaatctcctcatgatccagataacctcttctccattaacaatggggttttatagctaggacagtgcctggaaagttataagcattattattttctattattattatttaggagatgttttgggcagcttactacattgcacagaagctatctcatttcctagggactttgatgcaatagtcaattgtaaaatagacttttccaaagtcattcatttcatccattcctttaaacacctaatttttgagttcctgttatgcacaaggtagtctgctaagactaatgacaatgataggtgaatgccacccctgctattatcatctttagggctttgagaagttacttgacttttctcacttcagtttcttcatctttaaaatgagaatagtaatattactgaccttgtgaagatccccatgtttatgcaatatgggtattgttttatcaggcctttgtatttcagaagtttataagcctcatgaacaggagcaggggaccaactagacaaggaaagaggcagatctattcaacaaacatgtgttgagtacttactatgcacaaaggcaggatatcaatatggggggtaggaattcaatggtgagtaacgctgagacatgtggtgggattttagagcacacattttgcaaatcaaagagaacttgtgaatccctgtaacagccctagtgaaaattgttaagaatgattctggcaagtcccatattagccatatacaaattatccccattatagacttcccatagtgtatatctctagtataaaaagcattacaataatcacatttaatccttgttacattttaaatacgcatgtcgatgcaaattacaaatatcgaaaggaaaatgaagacagaaggaaaataaatcaagaaattcatttagagaaagaaaaatcacaatataaaacagccaatctttcttgttaagagcagccctcacatttctaaatgtatgaattggttttgtgttgactgtgccccaaccctgcttatagtatgtcaatattgggagaaatccatcactgacactaacatggcagccctctgaggagtcaagccaggggcatctagaggggcaatgcccaggcttcactccccctccttttgaaaggctcaggttgccttatagtcttccataaaaatactgagggcttttccaggactgctcactgtgtgataggaacttacatctatagggcatgtggtaacatgcaactgaaagcttagatttttttctagtgatgggtcacattctacactaggtccatcttgccattggtgccctgaagtgctttgtctaggccaactgatgcagtccacagagtctaaagaccactcaaactactcataacgtttcttgtggctgcccatccattccagttctaggagtagtttagaccatgttcatctctattaattatctcaagtctttatgcagaaacagcaacaaaaataggctatagaggtatgagaagtggttttgaattgttagtaaagagaggatgcaaaaatcagtttgtttgttgtcatttatttcaagctcaatattagatgccaatgttagggactatcaacatacaaagaacattttttaaaaacactcttaatgacaccttagtcaagtgtccaggttataggagtttccagcaagcatcagctagaccacacctgaagaattataaatagtactaaaaaaccaaaacatggaaaatgaggtcaggaatttgataagtgtccaatataatgataatgagcaaaaaggaaggaaggaagggaggggagggaaggggaggggagatgagaccactgtccatgcaataatccctttcccagtgttaacagttgaattgtgtccccacaaaagatatattgtgaacgtgacatgtttttgacatagagtctttacagatgtactcaggttaagatgaagtcattattaggtgggccctaattcattattactgttatcctcatgagaagaggaaagacacagggacagacacacatggagaggagaatgccatgtgaagacccagactcaaggagaacaccacgttgggagggaggcagagatttaagtgatgtgtctaccttccaaagcatgcccagggttgcctgcaacaccagaagctaagagaaaggcctggagcagattttcccctaggcccttctctccgtttaaatttatttttaaaaattttttagaggtggcatctcggtctgtcacccaggctgaaatgcagtggtataatcacagctcactgcagcctcaattgccagggctccagcaatcttcttgcctcagcctccgaagtagctaggattataggcatgcaccaccatgcccagctaattaaaaaaaaaaaaaaaatttctagagattttcctttgtaggaattttctgtgttgcccaggctggtctcaaagtcctaggctcaagtgattcttctaccttggtctcccaaaatactgggattacaggtatgagccaccatgcgtagcctcctagagccttcagaaaaaaacgtagtctgcaaacaccttgatttcagacttctagcctccagaactgtgagaaaataaatctctgttgttggaagccacccagtttgtggcattttgtcatggcagtcataggaaatttaatgcattcagcaatgctgccagagatggccattcccctctgccagcacattcctaatgtggtgccagtctcctaagccagtctgatgatgttggacagctccaggcatttgctgagggcttcccaaatgctgggcaccactctaagcacttttttcttttcttttcttttctttttttttttttgagacagagtttcactcttgttgcccaggctggagtgcaatggcacgatcgcagctcacccaacctctgcctcctgggctcaagtgattctcttccctcagcctcccgagtagctgggattacaggcatgtaccacaatgcccggctaatttttgtatttttagtagagacagggtttctccatgttggtcaggctggtctcgaactcctgacctcaggtgattcgcctgccttggcttcccaaaatgctgggattgcaggtgtcagccaccatgcaagcccacactaagcactttatctgcatttccttatgtaatcttcacaaaaacctataaaataggtacaattacttttccaactctgtaaataaagaaaccgaggcttagagaggataattaacctgcacaagaccacaccattcataaggagtgaacgggaggcaatctgatgctgcagccatgatactccacctcctgtagagaaaaggggaatgagtgtgatggttaagagaactgaaagtaagccgggaagatggaacagagaaggaggcatggagaaaggtgaaagatgtaagcccagtcttagactgtccttgtgcagagtatgagagccaagctgtacatagagtagacagagggagagtcatccacacctctcaagtcagaaagaaagagaatgtggcaaggtgtggtggcgcacacctgtaatcccagcactttgggaggcctaggcgggcggatcatgaggtcaggagatcaagaccatcctggctaacacgatgaaatcccgtctctacaaaaaatacaaaaaaatttagccaggcttagaggcacgagcctgtagtcccagctactcaggaggctgaggcaggagaattgtttgaatctgggaggcagaggttgcagtgagccaagatcatgccacggcactgcagcctgggcgacagagcgagactccatcagaaagagagaaagagagaagagagagagagagagagagaaggaaggaaggaaggaaggaaggaaggaaggaaggaaggaaggaaggaaggaaagaaggagcagttttaggttcacagcaaagtaccccctaccccctacacatataatgcagacaaacacacacaagcgcgcgcgcacacacacacacacacacacacacacacacacacacacagctttcccccatgatcattcaacacagggtagtatatttgttatactcatgaacctacattgacacattatcatccaaagtccatcatttacattgggtttacacttgctgttgtacattctgtggattttttattttttaattttttttttgagacggagtctcgctctgtcgcccaggttgaagtgcagtggcgtgatcttggctcactgcaagctctgcctcccaggttcatgccattctcttgcctcagcctcccgagtagctgggactacaggcgcccgccactcggctaattttttgtatttttagtagagttggggtttcaccatgttagccaggatagtctcgatctcctgacctcgtgatccacccgcctcggcctcccaaagtgctgggattacaggcgtgagccaccacgcccggccattctgtggattttaacaaatgtataatgaaatgcagctatcattagagcatcacacaaaatagtttcactgctgaaaactattctctgtattccctccattcaatcctcccctcccctcaactcctggcaacaactgatcttcttactgttttcatagttttactttgtccagaatgtcctatagttgaaatcataaaggatatagccctttcaggttgagctaattttattttagtgataaaaaatgttaaatagtatgtagaagaatttagggatgctgacactgtgaaaacaaatatatttaattacgctctacttggagtttgtttaaatcagatgtaaatgatatttgagctgattataccttcttcaaatggagtcttatttgaaagtctagtatgaagagatattaaaatggagcatgtctgggcaaagggaaaaagagattaggagttccaacaactccacacctctccccacgcctcatcctccatgatggaccttggagacttacatgaagcctccagtgcttcatgaaacacagcattaaaaccagatttcagagattaggactttaaaaatttagtgaatttataatagaagtatgatgaaaatgtccttttcttccataataaaatgggaaggtacattctataaaactgtcaaagtttacctgatgtttgatttatgcttttaataccttcacatacactttcttgagtttgttcaatactaatagtcaaaattcaaagaaaattaaagtcaacatctttttacttgttgaacacattaagtcactgtgatctacatgtaattccatcctctccaaattaaaattaaaattaaagttggattgactggtatacagattacagttcatgaagtctcgttatataacctttgaaccaaagtttatcttataaacacgtaagataaatgtcaaacgggaaagtaaaaaagattttataaaggaaaatagaagaactgaaggcacaggataaatctacatgaaaaaaacaaagagcgtttttaaacacttcttcatgtgaattcaggtgataatacaatggagttattttactcttaagacagattgacatatttaaacatagttctgatgatgtggagatgtctacagaatatatttcctctctaatttaaattatttataattgcatagttagttacaaagaataaaatcaaattaattactaataaatgccagagaaacatgtttaaattgacattcacttccaaagtcagctcctgcataatcaccacaaatttttaatatttgctacaatatgacaataaaacaattgcgtatattacagagtagaagaaactccttcaaagataaatatgcatttattctatttagttgtagaatgataaagataatttttttagaatggtctaaggataactttttcaagaaaaaagatgaaaaatgttctgttcccccaaactatcataagcctgccagccacacctctgccttatcatattcaacctgagtagatgacagtcgccacttatgccatattgagaaaaactctgatggtctgattagattcattgaaatactttcagtattagtagctaaatagggttctttttaaagtttaatttaacctaagagttgtaaaaatgaaataaatattattttaaatattgtagaataagtcaaacacttttagtttcaaatggattgtcaagataactgatgtactccgtaaatatatacatctactatgtgttcacaaaaatttttttaaaaagaattggtaggcataggctagtaaattgaccaatatcttcatttgcttaaaataaatttctaaaaccaagttgttccttgagacatatgcaatatcttcagaatttcatgccataagattaactatacttgatcaataaactttgaaattttaaaataaatacagaaaagttctttctcaattcagaaataactactgatattccctgggtgacttttttctcagacaagttagaaaaccaccaatttgactagattgggaaattccttaaaaggaaattagtgcaatggccgagaccttgactctgggatctcctaagttagagtcccaggactacctaccgattatcaattaaatatgcagtcttggtgatatggtttggctgtgtccccactcaaatctcatcttgaattgtagcttccataattcccacatgtggtgggagggacctggtgggagatcattgaattatggggcagtttttcccatactgtcctcatggcagtgaataagtttcacaagatctgatggttttataagtggtttccccttttgcttggctctcattctatcttgcctgccaccatgtaagatgtgcctttcaccttccaccgtgattgtgaggcctccctagccatgtgaaactgtgaacccattaaacctctttttctttataaattacccagtctcgggtaattagcagcatgagaacagacactcctaatatacttgggaaaattatataacctctttaaacctcaatttctcaaagtgagggatggtgaacagcagggcgaggatgagaaagaagatgctagtgtaagtaatagtacctccttcacaaagctataatatagattatatgaaattatgtgtaaaatgcatgtaacataatcagaagtgttaggttttactgctactcatgagtagcttatttatttattttttctcattagaagaaaactttaaagcgatgaattgtcttggtgaaaagtattaggagactcttggctatgggtaaaaatgtcagaaaacaatctataggctagagtcagtgcaaaggaagttatgtttttggtagcctaatataaatgtaggtcgtgtttcctgatgtcagcaacattctaagaggcggtcagttactctcacacttggaactgctctacctgactatgtagtgggttttgggagagtcctaaaaaccacatcttataatgtgtcttctataaaatgttccacagagttttttataaaacctttaaatcggccgggtgcggtggctcacgcctgtaatcccaggactttgagaggctgaagggggcagatcacctgaggtcgagagtttgagatcagcctgaccaacatggagaaaccccgtctctactaaaaaaatacaaaattagctgggtgtggtggcacacacctgtaatcccagctactcaggaggctgaggcaggagaatcgcttgaacccaggaggcagaggttgcagtgagccgagactgcgccgttgcactccagccggggcaacaagaacgaaactccatcccaaaaaaaaaaaaaaaaaaaaaaaaaaacctttaaatctttatatgtgatctgtttatgtattgagttctgctcttattgatcatgtgtgtccatagaggcaagatagagcagtcaaattgtgatgaccagtatgagctgcatttgaagttcagctacacagaattttagaaagggatagaagagatattattcacataaatatttaaagactaattggacactatagggacagcatgtaacatggaggtgaggagaaggactcctcccaatgcttcaacaagaacacagctgtgtagataccatctaacgctgcctctttttcagaaaagaatatcctacaaactcaggttttactatcagtatcacaaaataataacattattatgaaataatgtgatttaaacaatatttaaagatatgaaaggtacagtttcaaaatacaaagtgttatacaggtccagccatttagagatagactaatccattatctactaacttctggtttttgcaaatagtatactagaattcatcctgtaagtattaaattttataaatatccaaaatgcctgtattttgccaaaaagtaaagccaccctatttcaaattttttaatctcagtacctacttttaggtaagcccattgtaaccacaaagaaaatacatacagagcagtgttccccagcctttttagcaccaagggacagttttatggaagacaatttttctatggaccagggttggtgggggatggtttggggacaaaactgttccacctcagatcatcaggcattagttagagtctcataaggagcacacaacctagatcccttgcacacgcagttcacaatggggctcaagcttccatgagaatctaatgccgtcactgatctgacaagaggcggagctcaggcgggaatgctcactcgcccgcctcacctcctgctgcatggcctggttcctaacaggccacagactggtaccggtccatagcctgggagttgggaacccctgtatagagcacatacaaaagaaaaacagaaagaaaaaaaaacaggaaaggagaaatgggacaaaataaatacaagacaaacaaacaaacaaaaaaggttaacaaaatggcaatagtaagtcaataattaccttaaatgaaaatagactagactccccaatcaaaagacagagtgactgaatggatttgaaaacaacaacgacaaaagatccaattaaatactgtctacaggagactcactttaagtttaaagacacacataggctgaatgtgataggatgaacaaatgataatctatgcaaatggcaaccaaaagagagcaggagtggctatacttagaatagattttaagtcaaaaactgtcataagagacaaaaaaggacactatataataataatatcagcagaaggaaggctaattcaccaagatgtaacaattttatatgcacccagcatcagtacctctaaatatatgaagcaaacactgatggaactgaagaaagaaatacaatattagaagacttgcatatcccactaaatagcagatagacattcagacagacaaatcaataagaaactatagaccaagtggacctaacggacatacacagaacatcccacccaacagtgacagaattcacatccttctcaaacacacacagaacattctccaggatagatctcatgttacgtcacaaaacaagtttcaataaacctaagattaaaatcataccaggtatcttttctgatcacaatggaatgaaatcaaaaataaataacagaaagaaaactgaaacatttacaaatgtatgaaaattaaatgaaatactcttgaacaatgaataggtcaaataaataaatcaaaagggaaattagaaaatgtctcacgacaaataaaaatgaaaacacaacataccaaaatgaatgcaatacagcaaaagcaattttgaaagagaaatgtatagtaataaacagctgcataagaaaagaagaacgcaaatcaacaacctaacatacctcaagaaactagaaaaaggaaaacaaacttagcccaaagttagcagaaggaagaaataatgtagattagagcagaaataaacagagtaaaaaaaaaatagaaaaacttgaagaaatattttctaaaaagataaacaaaattgacaaactaaaaaaaaaagagaaaaaaactcaaataaataaaataaaaaatggaaaaggagacattacaacctgatggcttcaatgctgaattccaccaaaaatttaaagaacttatgctaatccttgtcaagatcttccaaaaaattaaagaaaaggggatactttcaaactcattttataaggccagcatttccctgacaccaaagccagacaagaatattacaagaaaagaatactacaggccaatatccctgctgaacatagatgcaaaattccttaataaaatactagcaaaccaaattcaacagcatatcaaaaagatcatacaccacaaccaggtaggaagaaggatgtttcaacataaataaatcaattaatgtgctgcactacattgccagaatgcctaggaataaacttaagaaggtgaaagacttgtatgctgaaaactatgaaacattgatgaaaaaaattaaagatgaaaataagtggaaagacgtcccacgtttatgacaggaaaacttaatatcattaaaatgtccatactacccaaaggaatttagagtttcaatgcaatccctatcaaaattccaataacattcttttttctttattttattttatttatttatttatttattttgagacagggtctcattatatcacccaggctggagtgcagtggtgcgatctcagctcactgcaacctccgcctcccgtgctcaggcgatcctcctgcctcagcctcacaagtaactggaactacaggtgcatgctaccaggcccagctaatttttttattgtttgtagagatgaggtctcactatattgcccaggctgatctcaaactcctgggctcaagtgatccacccaccttggccttccaaactgcgaaacttacaggcatgagccactgtgcccgccccagcattttttacagaaatagaaaaaacaattccaaaactcatatggaaacacaaaggatcccaaatagctaaaacaatcttgagaaaaagaacaaagctggaggcatcacacttcttgatttcaaaatatattctgaagcttcagtaattaaaacactaaggtactgtcataaagacagctttatagaccagtggaaagagggcccagaaataaacctgtgcatatatgaccaactgatcttcaatagagatgccaagaacagacaatggggagaggatgatttcttcaataaatagtgttggggcattgtatatccacatacaaaaagaacaaaattaaacccttactgtacaccatacataaaaatcaactcaaaattaattaaagacttaaacgtaagacctgaaactgtaaatccttagaagaaaacgtaggggaaaatcttcatgacattggtctttgcaatgatttcttggatatgacaccaaaagcacaaacaacaaaagcaaaaacagagcaagaggtatactatgtcaaactaaaaaacttctgtacagcaaaggaacaatcaatacagtgaaaaggcaacctgtagaatgagacaaaatatttgcaaaccacatatctgataaggcattaatttccaaaatatataaggaactcctccaacttaagagtaaaaaagcaaacaaactgatttttaaatgagtaaaaaatttgaatagacatttatccaaagaagatatacaactgggcaatagatacataaaaagattgttcaacatcactaatcatagggaaatgagaatgaaaaccataatgagatatctcacacctcttagggtggctattggtttttatttgagggggtttgtttgtttgtttgtttgtttgtttgtttgtttgttttgagacagaatcttgctctgtctcccaggctggatggctattgttttaaaaaaaaaagttacttggtgttattaaggctgtggagaaattggaacccttgtacattgttggtgaaaataaaaaatggtgcagctgtgtatatatatgtatggaaaactgtatagaatgttctcaaaaaaattaaaagtagagttgccatatgatttaataagtccacttctggccatttactcccccaaaattaaaattagaatcttaaagagatatatggaccccatgttcactgcagcaatattcacagtagccaagatgtggaaataacctaaatgtctatcaaaagatgaatggatacagaaaatatggtatatatgtatatatgaatggatacagaaaatgtgagatagatagatagatagatagatagatagatagatagatagatagatataacagaatatcattcagccttaagaaaaaggaagtcctggctgggcgtggtggctcacacctgtaatcccagcactttgggaggccaaggcaggcagatcacttgaggtcaggtgttcgggaccagcctgaccaacatggtaaaaccctgtctctactaaaatacaaaattaaccaggcatggtggtgggtgcctgtaatcccagctactggagaggctgaggtgggagaatcgattgaatccaggaggcagaggttgcagtgagccaagatcgcaccattgcactccagcctgggcaacagagtgagactctatctcaaaaaacaaaaagaaagaaaaagaaaaaggagtcctgccataagtgacaatatagatgaatcttgagaacattatgctaagtgaaataagtcaaccacagaaggcaaatactgcatgattccatttatgtgaggtatcaacaataatcaaactcatagaagcaaagagtagaatgctggttgccaggggctggcaagaggggaatacggggacttgctattcaatgggtataaagttttagtcatgcaagatgggtatacaacgtagtgcttacggttaacaatactgtacacttaaaaatttgagagagtagatctcatgttacctgttcatactacagttagagtattagtcctttttcacactgctgataaagatatacccaagactgggtaatttaaaaaagaaagaggtttaattgggcttacagttccaagtggcttgggaagcctcacagtcatggcagaaggcaaggaagagcaagtcaagtcttacttggatggcagcaggcaaagagagagaacttgtgcaggggaactcctccttttaataccatcaaatctcattagacttattcactatcatgagaacagcatgggaaagacctgcccccatgattgaattactgcccaccaagtccctcccacaacatatgggaattcaagatgagatgtgggtggggacacagcaaaaccagatcaaatagaaatagaaatcaaaatagacaaacaaaaaactagaaagaatctgagagcctatacttcaaggtgttttacctaagagatctgaggaaattacaaacatgatcaccagcactgaaatcttgaacttggatcaaagtaaccctacataaccacaaaatgacagggatataagtctcagagactttaaatgaatataacaggttcttgtagataactcatatacagagatccaaaaatgaaaaacttgttttacatcctattcacaatatgtgtagtacccttttcccaaatacttgactgataaaaatacatacagatttttaacttatccagtctattacagtttatttgccaactcttagttccctcttgtgctacgtttaaatttataagatgagtacagagactttttgaataactaatttaattaatgaattttaaagttaacttttgtagagttttagatacgtcctttggtcatacagtttagaaattacattgaaaagtaatctaatgcaaagttttttgtttttttttttaatttaaaaggtttgagtaaatctttctttctttttttttgaggtggagtctcattctgtcgccaggctgcagtgcagtggtgcgatctcggctcactgcaatctgtgcctcccggggtcaagcgactctcctgcctcagcctccagagtagctgggattacaggcacacgtcaccacacctggctaatttttgcatttttagtagagacggggtttcaccatgttggccagaatggtcttgatctcttgacctcatgatctgcccgcctcagcctcccgaagtgctgggattacaggcgtgagccactgcgcccagccgagtaaatctttctttaaaaattactgaagctgagtttaatatactgtatttatttgcatcaactcaaaattgaattttatgccacctttttggtcagttgtgaattgaaattttataactgaaattgtttacaagattatgttaaagtagggctgagagaatgaattttaaagtatgattcaaggttatagattaaattatgttcttatatattttagtcactttttgaactattacaaatatctagtaaattttttaatgctctgcccctttaattctggtcatgtaatttaggactgaaaggtgagctttatcttggaacaatattatctttcatttatatgatagcaaaaaaattaactatactgcctttattcaaaagtgcttaaaaacaactatatgtttactctctccacttcattattttcttcctcagtgcaaatatgtttatctggaaataatgtatgcattgtagcatgcagaatgtcaagctattttaagagatgcaacataatgcttgctataaactcttatattcagtcctcatttcataaaactctcatgtttaacttgaacatgctttcatgtaaaagctcaacttaaaagtgtgcctgtttggatgataagaaaaaaaagcaaacaaataaaataactacacctatcttgtactctttaaaatatatatgttggtttttaaaaataattgcactaagctaaacatgagaacctctatattagcaacttacattaaaagcaagtcttttttgggaaagcaaaataaaattaaaagacacatgattttagatcactgatctgagtacacagatctaatctctttgccagggttgtgtatactgtacacgacatttattttatttttttttttttgcactcacttattttgatccagtggatcttgacctattatcaagagtgagtgaatattgctagaagtggtcacttcagtatgacttaatctgaagacagagaaaaactggttataaaagaggaaatatattagaaaggagagtatttttgtatctagcaacctggaatatgaatgtaaaagagaataaacagttcaacacagaatgataaagggtgccattgagagggtcttctggagttggttttgcttcattcaactatgaaatgactacatgtattcatttatccctcccctccctcattttgagggtataataaatgtgtttctcctttttctcctctttcttcaactctatctccttgaaagagaataaacaactaaaaacaatgctgcacccccactcaccttgataagcagcatgagtctattaaattaagcatgcttgacactcaaacaccaattttagggacagagtgctcaaaatagaaagcacaatggtgacatcctgttaccgtctctttgtgcccttggactcataaataaagttctgcaggtttctgtgctcccttgatacaaaataaagaaaagtgaatgagttagaacaagctctggcagccatcagtaatgttgcaccccattgctgcaggacaggagacatccaattatggagcaaggtcagcctcagtctctaccagtattttctctggtggtcaagagaccctcaccccctcaccaccaccaccaccaccaccacgattcccttctacctgatggtgctccgggactttatttttggatccttcactgcttgacttaagaggaggaagacatgataggccagtcagtcttggctgggttgtgggaaaagtgagaggacagaaccagattggtcagtttgtgaatcttgtgatcagctacttttagaatttatttgttgttaagtttgaccaacaaatttccatatccttcatgttttctcacaaagatctttaaattgcctttcccagcttcccacctaaatacattcaaccatcataacacattccaaaatacagtggttgcccatggtttgcccaatactgggcaataggcactcagatcccagttagtgaccaatatacctatgggacacaaatcatatcaatgaggcacagctgcagggtgcatgtctactaaggatactgctcatctgaaccctcagactatacattctggtaccttagttctgtctcttggtgccctttcctgcgggtaacccacattcttattctctctccatgcggcatgggcactctctctcctgcctgagtcatagttcctggagcagactccacccccatgtttcagatcctgcctgagtccactgaatgaaagcaacaactcctgcgtgtcactcacaattccctggatgatactaaaaagcaatctttctctcattttcgaaacccctttgagatattaatgacttcctagatttttttcaggacttagagattatttcagaaataatcatataataagaagcattttgaattggagactcaaattgctctttagatcatactatataatcttaatgatgatgacgatgataatagtagctaccattgaacaaatgcctactatgctaggtgccttctatcttaaccatggttaattctcaggggcagtcctcaaaagttaggatattgttcctatttctcaggtgggggaaatgactttcagcaggagtaactatttttattcatcttatagctttaaattggcagctagattttgaccccatgtctgactcgaatttcattttatttccacaacaccattcactgcgtagagataagaactgtgagctggtctaataattttttcttcctgcaatagaagtccttttctaaaatttgggtcaactctcagcactcgtaaaaatatgcatataaaaagggaaagaaatggaggaaaatattttcccattaaatactaagacctactatacactaagctacagtatttaaagcacacaatactaggaccaattggatggattatgataaagagactagacactgacccatacataaaagaacttggaatattatagaggaaacacgaagaattaatgaaaaaaggaaaataaatgatgttgcattaattgaatttcaatatttgaaaaagtaaaatagctttccctcctgaaacaaacaaaaaattcagggagatattggatctcaatgaaaagaacatttaaatatattaaaaaacaaaactttaaatatattacaggaatatgaagataatacctttatgatatctgggtaacaaaaggcaaaccacgtaaattaagtaaagcaggattttttttaagtaactaaactggtacaatttataaagtacacatactcctttgaaaaagtaggtctcatgtgaatctgctcaaattccagggctgtattcactttcaccaaacactaatgacctgaggctattgtatttttctagttttcctgttaaaaagagacatgagagtgttgactctcaggtgtgagatcttgactgatcccacacctagcccaactggaggcttaaggctactcatcacagagtccttctggagccaagataaatgcctatgaatctcaacttttattcacagctttcaatattagattttttaatattagattttaatatttttcaatattagatttcatcatttcctgtgcccatttccctagctcaagggttcacttatctttgataagtttattggctagatgtatgtacgatgactcactctccatcacataaaacatacaattttgacagttgataaaaagatgttcgcataaactataatcatataattaaatatgtaccagaaacctaaaaaatagggaagagggaagctgatagtattttactcacatttaactaaaaagccatacattttaaatctatgaggtaagaagaaaaatcaggaaatctgcctgaacccattagtgactattcatgtaggatttttttttttaattttattttttttgagacaggctgtggcccaggctggagtgcagtggcacgatctcagctcactgcaacctctgcctcccgggttcaagcgattcttctgcctcagcctcctgagtagctgggattagaggcacctgccaccacacctggctaatttttgtatttttagtagagatggggtttcaccatgttggccaagctggtctcgaattcctgaccttgtgacccacccatctctgcctcccaaagtgctgggattacaggcgtgagccaccacgcctggcctcatgtagaattttatggtcacaagcctgtagttctagcagggaaactcaacacataaaaaggaggcctttaaatgcattgtcaagaatgacgaaaggagctaagtatcattatattctgatcaaaagaaaaggcaagtgtccatttccaatctctctttctctctctctctctctcacacacacaccccccagcagatttgtaaagaaaggtaaataaatcccccatacaaaaagtttccttttttccccacttgggtctgagagttgttcagtttaacctgagttgccattagtgtccttcgaagctataaattttgcttttccatgcaattgtttcaaaacaaagaaaatctgtgactttaaaattactttagagccaagcatggtggcgggtgcctggggtcacagctactttggacactgaggcaggagcattgttttgagcccaggagttctgcgtggtagtgcactgtgctgatagggtagtcgcactaagtttggcgtcaatatggttaattcctgggagcgggaatcatcagtttgcctaaggaggggtgaaccaagccaagtgagaaacggagcaggtcaaaatttccattctgatcggcagtgggttccacctgtgaatagccactgcactccagtctggataccatagcaagaccctgtctctttaaaaaaaaaaaaaaaaaaaaatggctttagaagcaattttacaccctaacttaccaatataggtagcggtccgactttatcgccacaggaggaaaaaataaaaagcagagtaaaacttacagagcaatggtagatacaatacgatcaatacaatcttcaaacccaacttcactgagcatgagtttctacacataaaagagattctttcattatttcttttttaattatttatttatttatttatttttgagacacagtctaactctgatgccctggctttgagtgcagtggcgtgaacacaactctctgcagccttaaccttctgggctcaagggattctcccacctcagcctcctgagtagctgggaccacagacaagcgccatcacacctggctaattttttaaattttatgtagagacaagatctccctgttgcccaggatggttggtctagaattcctgggctcaagcgatcctcccacctcgggcaccaaaagtgctggaattacaaggcataagccatcataaccggtccaagaaaatcttttagaaaaccccatcaaacaaatcaccatactatttaactgtaagtccaaacaatagtttcaatcgtaatatttgaagcaactagtataaaaagagaaactcataagctagcttacatttctgttgtcaaagagtaatttatccttgctggagttggtttggaggtattaatagccggaattatcccaacaatattctggcaagaaactatacacgtactttctgatgtgctctgatgtggccacagtctggcgctgagagtagctccaacatgagggactgaagcaaaagggtttcccaaagaagcactgtgccccggagactggaaggagaatttgaggaagacattaggatgaggcatctcaggggtgtaagagagagaccctggaaggcatttggggccatgacttaattataagctaggaattgcgtgtgtagaatttacaaagtaaacaaaatggcagccgagggtggggatagttcacacccttagtaaaggctcgacattatagaatctgcctcatactaggattcccagtagcttttctggaaataggtctccttcctctcctgccagccctaaaataatattggtaacacacacaccaacttctagagagcactcacaaaaaaagttgtcaccgccaagtgacctcactgcttctccctggagagctttgcagacagaaaatagctctgtgtctttataaacaaatcactctgtgaatggcagtgggtacacaaacatgtcgattctcttccagagttcttactcgctcaattgccaggtttgcttctattttggttacagaattaaaatgtaattagttgtgtttttaatgagtccaaatgtgacacattaagattcagtaattactctaaaatgataagctgtgattgaatgtccccataaacaagggacatttaaaggcagtaccatttcttgctcagttgttactgcttttaaaaccgtcactctttcctgggtgaatacagttttaggatttaaatgattacgctggattattgcacatatttacagtcagagccagctataccgacatatttaaagtgtgtacgttctttgatcatgtggccatgtctacctaagaacctaataactgactttactgaatgttggctgtccaggttagtacctcattatgacttactggcttttaagacacgtttattttatgtggcatcagtttttctcttcaacctgatgcaagacctcactgctatttctgaggttctttatgtccttagtgtttggcagggctcacatcaggtctagaaaagtggtgctagaggttcaagatccaatacaacaatggcagcagtaattgatgcacttgccccatacggaaatctgatctcttaacccacctgtttcctaggctaactgaatcagcagcatgtcagtagctgccaatgctgatcaatttcctagtgacattggtaacttaaaaaacattgaaatagttaagttcgttgtagaagtaagcctttcatcctacagcaaatcaaaaacaaacaaaatggataaatgttttctgataacttttaaaacagtttacctaagaggaggaattgtaaaaacttaaacataaattgagatcatcccacctgattttttaatattcgtaggaagcctgttcatgatattccagtcaactactctagaatcctattttggtatctcagtatctcgtgcagcagtgaatagcactgctcaatattttagaggcttcatatttccttagagtcacaattgtcaccctaaaatttagatctaataatcctactactgtcctgtgtaggaaaaaatacagaaagcatatacttcttatttcccagccttcaagtatgtgaagactgctatcaagaccactgtgtcttactggccaggcgcagtggctcacgcccgtaatcccagcactttgggaggccgaggtgggcggatcacgaggtcaggagatcgagaccatcctggctaacacggtgaaaccccatttctactaaaaataaaaaaacttatctgggtgtggtggcgggtgcctgtagtcccagctactcgggaggctgaggcaggagaatggcatgaacccgggaggcggagcttgcagtgagctgagatcaggccactgcacaccagcctgggcgacaaagcgagactccatctcaaaaaaaaaaaaatccccgcttccaacagcagttctcctggaaccctaccttcccctgaattttgtcatatttatcaatgcctttcttatggcaaccagaagtatatagagcagttcagttcacaaagggctgtaaatacagtaggacaatacctatctcactttactttggacaaccagatgcttcaaaacttgctgatggtagattaacttttcatgtaactttatttattttactgttggcacacacggcatttttgtgtaaagttttctaatgatttttacatgaaatgatgtccagttataaatctctattctataccttgaatttaaaccaacaatttttttcacttaatcctattgtattatgtggtgttgtttttattattctaatctatttaaagcatattaatctcactctgaaagctgtataaaaacctctaaatctgggccgggcgaagtcgctcacgcttgtaaatcccagtactttgggaagctgaggtgggcagatcactagaggccaggagttcaagaccagcctggccaacatggtgaagccccgtctctactaaaaatagaaacattatctgggcgtggtggcacaggcttgtaatcccaactacttgggaggctgagccaggagaatcgcccaggagacagaggttgcagtgagctgagataatgtcactcactgcactccagcctgagcaacaaagtgagaccccgtctcaaaaaaaaaaaaaaaaaaaaaaaaaaaaaaaagcctctaagtttggttcatctgaaaatttcatgagtctgcttactcttacaagtccttgctcataatattgaacaaaaatcaccaagaatagacatgtgacacatacaccaacagaagtctctccccagcagttcaataagtggaaggtactctagctagcatctccatcgttcaactgtaccccagtatatcaacaaacacattatgagtggttcaaatgaatgcttttctgaaatgatgccatcctcaatggggaagtttcccagtctatcaatctccatgcagcataatttgtagaagtcctacctttcatttctagatgctaatcgatcttctattcaatggaagatctagcctactggtgtctcattttttattcttcctacaatttagaaaatcagatcagcataagaactttatttttaacaaatattaatataaaagtattacgtgtttttctactgcccatatctgttctgtccaagccatgtacattcatgttaaataaataccgtcttttaaaacataaatagcatggttactccacattgactcctgatgtcccaagatgttcaagatgcagtaaggagaaatattattttaaaacaattcaaagggagtgaaaatggtagcacacaaaggaggcagcatttcctgcttctcacaagaccatctgcctgtattgtgggcaagattttttaaaaatcctaactgaaaagaaaataatgttaagagacatatgcccatgtttacaagctgagggaaattgacaagtgtgtctgtttcgccagtatttttacagtcaactgttatacataatggggaaaattaaaatcggtaattacttttctagtctgccattgttttaaatgtgcttggaattttccttaagcatccattccaagtaattatttgtaataggccagaacacttaaagggttgtagggatggatacacagctattttacaaagtgaaatactttgacaataacaaattatttttcctcctttctctccccaatgttggctgagttatgtttatacctcactttgtagataatccttctagctacactttttttaggcacagccattataaaaatcttctgtttgggcttggcactgcttagaactagaaattgctatttgctgcctgccaattacagaataatttaaggtttgatgctcccaggcacagtttcttgaaatacacagaaaaaaatatattaaggtggatgcataatattttttctgcattgcatagcttcaattgcctgtatagaattatatccaaattgctaaacaaatcaattggagaaaaattatgtcttctaggaaagtgttttgtaatggttttactactctttcttttgataagatcatagcaaatattttacaaaaattttatattatttgcaactgaatgatttcaatctatgaaatgtgatgggtataaatattgatataattttaacataaaatttaaacttctaggaaataatagaggaagatgtgatttttttaaaatcaatttggaataattaagaagaaaagaaaaaagagagttaattaagtttcccggatcttttcaagtctaaaatgcaataatttttcatctttgtatattcgtatctgaattatccatcatttgcagtacgaagcaggaaagcggtaaagcaaagtaaatttgtgatttaaaaggatcaagtatatggttgaagactcaaaaagctttttatttgggacagtagaaggaaatgtgctgattatcatgagaacaacaaaaaagagaaatgagttatttatgtaaccctgtcatcatgcctacaacacctcgaagggcagtcaggcatagtctgttatcaggaaaagcaagcaaacaaaagcctttatatatatatatatataactaatcacaaacatgctcagactccagaagatggtaaaataaaataaaataaaataattttattgacttctttcacctaggtgccttggttgcactccctggaaaccattcttcgcattccccacttacttctcttttcttttctttttttttctttttcttttttttttttttttgagacagagtcttactctgtcgccccaggctggagtgcggtggtgccatctcggctcatggcaacctccgcctcccaggttcaagctattctcctgcctcagcctcctaagtagctgggattacagatgcgcgccaccatgctcggctgatttttgtatttttagtagagatggggtttcaccatgttggtcaggctggtctccccacttttcttaattcacccctgaaatacactacccaaacacgtagcaactgaggtctggaaacttcattcttgacttcttctaaggaaggccactttcttcaaaatacagcaagacaaacacatctagctcctagcatgacttcagtgtgaaaaggctgggcttgggagagcagcaggtagacatgcctattaacattgtgctgccatgtttactttttttttgtttacttaaatcatggacagaaagccaagtgtataagtgaaaacccaagggacaatgacatggggtagactgcagaccaagaataagcaggaagttaaataccaagatattcccccaaaataaaccagatagcttggtttatatggaagaaaataaaccagagtaccactaacataagcatgacagaaggttttacacaaaactttagcagaagtgggtccaaatttcagctagtttcaggaatagttggtcgaggatggttctccaaagagggtggaattgtgctgttgatcagctgccctcacatgagcgatttgcattttcttggcgagaaatagtcgctgaagtcaagcagaagagtacgtgagaaggaatagctgtgagaccaggacaagccaaggccacagtgggatattctcagtccgtctgggtctctagatttacaaagaagcatgttgaatctgtagaggcaaatgggaagctcccccttcaccctctaaaggttagctgaaaatgagtaaatgacaagagggggattaataggaggaaaggacatagagaaggtaattaacatgcttagggacaggggaatcacaggaggagaatgacccaataatccagtgaggtcctgacacttatttgtatacccttcttcacagggacagggttgatgaggagtgtagggataaatgacttacaggggaaatgaataagcccaaagcacggtggtctgggacaaagttcctctgagctctaggacaggtggagggaaggtgagtggttgagcttcactgtaatcaaaggttatcttattatgcagataaagcctcccaggtaatctcttggagctgtcttgagaagaatagatgaaaagtctttctgggtgcagtggagactcccagtgtctcctcttctccagtggttaatctttcctggttgtttgatgagattcctagggaggaggtcttaagacaattgcatttccttttaaagggttttcctagtcagataaggaaattccggttctggtacagtggctcacacctgtaatcccagcactttgggaggctgaggcgggaggattgcttgagcccaggagttcaagaccaccctggccaacatagggagaccctgtctctacaaaaaaaaaaaaaaaaaaaaaaaattagttgggcattgtagtgcatgcctgtggtcccaggttctcaggaggctgaggtgggaagaattgcttaagccagggaggtagagaggctgcagtgagctatgatcgctcaactgcactccagcctgggtgacagagaaagaccctgtctctaaaaaaacaaaaaataaaattccagcaagagtagctcccaatgcttcaggaaagaaaagagatcagagtggggcttgggagggaacactggagagaccttggttctgaggcttatttctgatgcctttaatttcctttaattcaaagcatgccaaagagccatatttttggaggagtattttctgagccccaagaactcctcacaatgcaaaatggatgcctggctttcatttttttaaaatgatttatttaccttaaaaataaacttggattcatttgatcttcataatccctgtagataatttaggcttccaaaggaaacatggtctctattggcctaattaccaataaccaagttaaattccatttctgtacagaatttttttaaaatttacctcacaatctagaaagaggagaaaaaaataccttaaaaattaattattttcaaagccatgtatatgcagatttggtcatggcttattcagaacacattagaattattttaaattctaagtatcctcaatggtgaacttaaaatttcattctagggggaggggggcatggttaatgagtagaaaaaaatagaaagaatgaataagacctactatttgatagcacaacagagtgactatagtcaataatgactgaattgtacattttaagataactgaaagagtgtgattggattgtttgtaacacaaaggataaatacttgaggggatggattccccattctccatgatgtgcttatttcacattgcatgcctgcatcaaaacatctcatgtacccccataagtatatatacctattgtatacccagaaaattattttaataaaataaaaataaaataaatgaaataaaattttattctagccattccaggaaaaaaaaaaagccccattttgcaaagatgattataaccatatatatcatatgattatcaccttgttttcatacacacaagcatatatgtatgtatatatacatatatatttacacacacacacacatatacacacacacacatatatatatgtgtgtgtgtgtatatatatacagttgacccttggacaatgcaggggttagggctatgtcctgcacagtcaaaaatctgcatataacattggactccccaaaattttaaccactaatagcctaccgttgactggaaaccttacccataacataaacaatcgactaccacatattttgtatgttatgtatattatatattgtaatcttacagtaagctacacaaaagaaaatgttattaagaaaatcataatggccaagcacggtggcccacacctgtaatcccagcactttgggaggctgaggcgggtggatcacctgaggttgggagtttgagaccagcctgaacaacacggagaaaccccatctctactaaaaatacaaaattagctgggtgtggtggtggatgcctgtaatcccagctactcaggaggctgaggcaggagaatcgcttgaacccaagaggcggaggttgcagtgagccgagaagaaccattgcactccagcctgggcaataagagcgaaactccgtctaaaaaaaaagaaaagaaaaaagaaagaaaatcataatgaaaagaaaaatatatttactagtcattaagtagaaatggatcatcatgaaagtcttcatccttcctgtcttcacaatgagtaggctgaggaagaagagacgaggttggtcttgctgtcccaggggtgaaagaggcagaagaaaatccatgtataagtggactcacacagttcaaacctgtgttgttcaaggatcaactgtgtgtatatatatatatatatattttttttttttaggtttattgcaggaacaaaatcctctctccaaagctataatcctgactggctcaagatgtcttaagaaacttagaaacacagctaggaataaattacagcccaggctagttggttgttctcccggaatgagcgaattcaaaaggaacctggttatttagcaagaaatagactcagtgacctcagcagcattctaatgcatggaaaggtcagagaggtttcgtaccactctgctgggtcagatggaagccagagaagctgttggggtctccttgaaggttgaccctgggctgcaggtcaggaaacccaagtaggattccaggaatggattgctaagaagcttcgaggagaatggcttccacccatgactgagaattgaattgaggtccaggtagaatgggtagtacctggtcacagcccataagaaataagaagaggctatgatttgaattggtattaataacaaagaagaaaagcagcatttacttcgggcacaaggccagccagcctgctctcagaagctaaatgcaagtgacattttcttgtcaaatcccaacttttacccatcaaaggcttggggagaaagggaatccattgcaatgagttggttctgtagatagccctgcagaatcctggggggtgtttcacacgccagagaccaggatgggttgcggaaagcagttaactaccaagtatagtaagggaggcacagtaactcacctggaattgactttgcaagctgaagactgttttcaactgtgactgtgccattaggattaatgcaattcatacagttggctagcacatcagataaatatgatgaattgtccttatatccttagtccagtgagaactggcttttccatcacagcttaagctatacacatagagaggcaaaaaaaaaaaaaaaaaaaaaaaaaaaaagaccttacagttttgtttattgtgcttatcacaagtgctggaaactcacattttcattgctaatagccctctttgaaagtttgttgacatttcagctgatctttaatgtgctctactgttataatacccttgggcaaagtcagtttccaataggaaaatagacagcttctgggtacccctgtggaagctgcacaaacacaaacagactggcaccccagcctgcaatacctggtgagctctgctctgtccgaatcacagaagggtggcagaatatataacctcaaagcatgccactttggcataaggattatgttgaagtaaaggctcttgaaaaatagcagatacaagaagagcactttgaccttcctttttcttcctaaaagcaggagataaatctccaggggaaagttgttgtccctgtattgggaggaagaaacattcttatcaccagagatagggagtgaaggtcaagagaaatccgtaccaaaaaactttgttaaattaaccttatctgtctcttcacttttctacaattaactgctctggcccaagcctctttgtcttgccatgttttcacaaggtgctcctcttcatccaacttaggatataagcatctgactctaactgcttctttgggtcttcattttcctatgtgaattcccatgtccatttaaaatctgtatactcctatcttggtaattatctgatagcgatttaattctcaggcccagccgaggactctcagagggcagagagaaagttgtgccttccaggatcactgtatttgggagcctggaagacgaagaatggagcccagtaaatagagagggaaggaaagacatttaaacaggttcctaaagagaatgtgaggacacgtaagaacaacagtaagaaaaagtacagaaagaaaaatttacaatctattctacagagcaaattgaggtatttcttctgtaatagggaaagaggaaagagaagattcatgactgaccatcagtaggctttatagtggagagagaattgtccaaacctccgtataatcaagcacatatcctgattcttagaatatatgttccaaactaaattaagaaagggtgatgctggacagaagcagttattaattctggggtcaacaggataaaaatagtcagaaatgaacgttgtggtttgggaatataagcagctgaattcaaaataagaattctaatagaaagtgttaaatcaaagagcagttcataaagtcagagctagaccttgggtggggggaagagcaattcaaaaatttagagcagcatgtatcttaaaaataaattttattgaaaaatgagaacacatggacacagggaggggaacaacatacaaggggggcctgtccgggggtagagggcaaagagaggaagagcattaggacaaatacctaatgcatgcggggcttaaaacctagatgatgggttgataggtgcagcaaaccaccatggcacatgtatagctatataacaaacctgcacattctgcacatgtatcccggaacttaaagtaaaattaattaaataaaaaaaaatgaaaatgaaaataaatgttgttatgagaactcatagtggcatggccccaattttagaaactgagcttaatacagttaataggtaaatgttagatgaatacctcaaactgaatgttaatgccaaaattaagatcattctttggttcaaaatatagagcatgtttatatcttaattaaaagcagtcatacttaaatctctccttttcggccaggcacggtggcccacacctgtaatcccagcactttgggaggctgaggcgggtggatcacctgaggttgggagtttgagaccagcctgaacaacacggagaaaccccatctctactaaaaatacaaaattagctgggtgtggtggtggatgcctgtaatcccagctactcaggaggctgaggcaggagaatcgcttgaacccaggaggcagaggttgtagtgagccaaggccacgccattgcactccaggcagggcgagaagagtgaaactctgtctcaaataataataacaataataaaataaatctctccttttcattatttatagaaaatcatagtattttggcacattaaattgaacatatttctttaagtaattaaatgtacgcctatcataatgtattcctcctggtacttaactatcatagattattagcagtttagtgtttaaagggaactcaggactgagagttttaaaaacttagactcacagtaagaaagtcatctcatgttgatgaagtataaatatgcacatacacacacagacacgtcacatgcaggtacataactaaaatgaaagcttcctgaaataatacttatttacactttgtacagaatcgaatgcactttatttcctagtctttgcattttaaaaatatacttattttttttaatgctgctcctggttccccaaattgaaattactatctaccaatgtatctcaatttacagtttggaaaacactgccttagggaatagctagtctaattttgcacctgagaaacgtagagatttagggaatattcccaaggtcacgtagtatgtggcaaagcaagcctgtgctgtcttctaagttctggcgtaatgagttttccccaatcttacattgttacattgttttcaagatgaatggtcatgtatagtgtactctttgcctctcaaatttgatgaagtaagcattattccgttgctacgtgtcttgctcactttgcgttttcttagtttcataggaagcatcagttgtgctaagttttatttgtgtgttccattgtctcttccccctaaactgaaagcttcctgagaatagtgtgtattcttatcaatatcccctaaaccaagctgagtagtgtgaatgattgaatccttagaaagacaagctcatgtagtcaaatagtctaaattacatgagtgggacaaaaatatcagcatccaggtagccacagatgctcttctttccttctaagaaatacgattctcattccatacctagatgatgggttgataaggtgcagcagaccaccatggcacacgttcacctatgtcacaaacctgcatgtcctgcacatgtatcctgaaactttaaattttaaaaaaggaaatatcaattctattggttatgctgattagagtaataagtggagagggaattgagaagttctaagacaagctgtgttagtatcctagggctgcagcaacaaagtaccataaacagagtagcctaaagcaacaaaaatttactctctcaaggttctagaggccagaagcctgaaatcaaggtatcagcagggccatgatctctctcgtagcttctggtggttgccggaaacccttggtgttcttggcttgtagacacatcgctccaacctcagcctctcttgtcacgtggcattctctctgtgttttctgtgtccaaatttcccccttcctattaggacactagccattggattagggcccatcttaatcaagtatgacttgattacatctgcaaaggtcatatcgagaagtaccaggggttagaacttgaaaatatctttttggaagacacagttctacccaccacagaagctacaccaatttacatgaaaaagaacctaagtagatctagaagagttggagagagaaatgggatagaagggagatgagcaggaagacatgaaagcaaacaaatgagttatcttcaggggagaaaagtgcttgtccagtgtactatggagagacgcataaatgaagatgactttaatacattctgctttgcatcatgcaacataactttttttcttttggtgcctctcacagagacctctgtaaatcctaaattatcttttaagactttgttcaagtcagattttttagagttatttcagatgttatgttattgcaggaagcagctcacaagtgacctagcattaaagataataaaagctaatgtttttatgtgagtagaagatatagcattgcatttaaactatagtttcaccattatacagaaggaaaagaagacagcaagcagaagagacaataatgatatattgaccttactgaaagatgatgacataaagcagtaggatttatcattttttgtaagttactgaacattgattcagtgttatgcatcttgttcttctatatattaagcaattatgtttatttctagcactgaaaagcatagttattttcagccaataattgctatttgaatgctatagttaatgtttttataatttttagatgacaattttattttaattaactctcttagaaacaatcatttatttatttgctcagcaatatgtgttcagtatccaaagtgtgttagacacaattcagtatatccgtcccctatatcgagagtctagttagagtgagttaacaaaagcttttattcatgggaatttatagtataaaagtgtacaatagtataaaaaggctgaaagatttctatagtgatttcactatgaagagatctctctgatatttttcttccctttcaccttatccagtctccaacgtttctgtaaaaaacagctacacccacttttttcttcctgtcaggtgaatccagatagtgcagcaaagttgagccaccgacactgaatttcccaccacaagtgaaacagcagaaaaggctttccaagttcactgtagggaaaataaaagccatgtgatatttattgcacatccaagtatatggattaagattaattcctctggagcaataatgatcacactttttaaatcttacaactcgttgatagtcatcaaaattgaagatccaaaaagcttttatttttatgagttttacatatcagaatttcatgtattagaaattaaaactgacaaactttaaatatttattttaagacaaatgatatactttaaatattaatttaagacaacattaaaaaccctctacttattagcataacatgcttttattttttaaaaaaactacattattccaaaacaaaaaaagattaatgagaagagtagtgttgttccattacacacccatgagtgaatgagagtgaaaaaggaaattgatgtcttaatattattatgaaaattatttggtccaatagttaatggatcccctgaaaggtattcagaacccccagttgtctcctggccacatttagagaatttcagccctagaatgttctgatatgtagtggaggaaattgattctatagtacagaatcagagggcaactcactggcctgctccccacctcagctatcatatgatgcacagtccctgaccaagtggatcggaaatgtctcctgttgtaggtcaaggtatccctgagaaccacaaactgagatatggacaaaagagcaaaagcgccgtgcacatatcttgagatgcaggttaaagaacaaaacaagaatgcatgtattttatctcaggacactaagtctccaaagaatggcttgtgatgggggtacagacttgacccaagaattactgactataatcaaaccacagtttaacagaggtgctatttatagtgaaaaattttcccccaagcaagaattccatagtaaagtaagatcacagttgcacactgcaaatctttaaaagaaaattccagaatttatagcttacttagcctacttagctacttgctttgctcatatataccagttctttcaactaccacaaaaataataactatttgaatatactcaataaacaggcattgtgaaatttgaattttacaacatagaatttggttactgttcctgttaaaacacaaaatacatgagtgaatatttatgtgtatatttttcaataatgttttccaaatgacctttggagaatatctcaagatgattatttctttggcagggggcaaaaaaaaaaaaaagctatcagtgagataagcacatcaatcgaactgttttcatttgagccatgtttaaatgagctaggatgcaaaatagaaattctggaaatatccaaaagaaagatgtacatgtcctctgatttctcctaagtctggacagaattggcagcagaggctctaatgaaatcttgcaattagtctgagaagcccattcagagagcttcactgtgttcagccttctgccgctgacacccttgcctgaagacacatgcccatatcgaagcacatgcagatgcctttcctcatacctagaccctgaaatgaccatggaccgcaggattctcatgtgagatttcagtttactgcttaatttttcatcttgattggacttttcatccatcatatcaggaaaagctgaatatacagacccagacatagataggtttggggacaggaagaagatttaattctacttagattgatcccattttttcttttcttttctagaaatgagtgagatcatttgctgatcctgaggtgtggagggaaaaagtcttggctagaggtgtaagagaatgtgtggaagatggaattgactaaagaaagtgatagggttgtcctgcaggtctgaggacccaggtgatattcatggtctccatgtaacgcataactggtcagcaccttttgtttgcttgtttttctccaagttttactgcttagatgcggtaaaataacatctggcattcccagagttggttttccaagtaatgtcacttactgaggcaggaaggagaaaaggtgtttgaggtttgaagagacaggggaaaaagtctgttaagagaaaaggagtgaaagtgaccagaaataagttagtaggattgacaggaactaaatgggttagcatgggttagcagagaatgagatgtaaactctgttggggttttgctgacaaatacgatggagagagctgaagttgtttgtttgtttgtttgtttctcaaagatgtgataattacagtgaaccttggaatctaaactaatgaagaaaaggagtgaggacaagagagtgaaaaagtgatagtcaatgaattgaaggtcccaggagaagaaatactgtatttgagaaccagagtaaatgaaatggaaaattaaaggcagtggtcagaagtcagcataactagaataaaagtttgaaaagataatgactaagtcaagggtatcaccaggggagtaggtggctgaagtgcaatcggatgaaaaaacagtgggaaacgagatgctcaaagaaatgggaggttcgtaggtcactgtggtccagaattgcaatgattatgtattcagttccggttaaccaagaaattaagcattttgcaattctaaaatcatcagttgatatactaaaattaaagtctaaaatgccatgaacattatgttagatacatatatattaaatggaaatcaaattgtatacgtaaaaaaagatataaagaagaaatatagggctagacatagtgtcttatgcctataatctcagcactttgggaagccgaggtgggaggattgcttgaactcaggagttggagaccagtctggacaacatgaggagactctgtctctaaaagaaaattaaaaattagccaggtgtggtgtcatgcacctgtggtcccagctgcttggaaggctgagatggaaggattgcttgagccttggaggttgaggctgcagtgacagatgtttgcaccactgtactttagcctaagtgatagagtgagactgtctcaaataaataaaccaataggacatattaataaatactgtgatcttaagcaaagacgctttaactttctagagcttagttttctcatctgtatcacgagtaatttgaattaaattatctagaagttaattctttgcctgaaatggtttgtttcctttatccaatattactcattgattataatgatcaccaaaaaatgaatacttacgtgaatactagagaaaaaatattgcttaattttgaaaatacaaattgcttatttgtagaagctattttggttttatttgtatgtttatttaaagtttgcgagggaaccagggttatcaggatcactctgatctgaaatctgagatttgggtaatctcacttctatccaaaaatctctaggacatcaagctcatcaaggtcttcagatgctcatgatgcattaattgccctttgagaataactgcctaagagatggatgtttatattgattttatggtagatattttcttcttcatgggagtggaattccttttacaggttgattcacaaacctagagccaaaaatataactgaactattacagatttaaagtatagattgcataattttgtaaaaatattatcatacaaattctaacatatcgtgagctgaattatactaccacaactaaaactcaattacttataggagtcagacgtatattctaataagacagacactgaaattgctatttttgtctgctggccaaattaactcccaactcatcagtttgcctcccattccctaaagccttgtgcatatgaattacctggcactattgctaaatacagatttttttgcagtaagtgtagggtggaatctgtaattccacatttctaacaaggtcccaggtgtgtcagtgcaacacatctaaggaccacactgaacataactctatacaaaaaggctccactttttattaaactgtgattctgaaaacccaagtagaaatcaggtttttaaaaacttatcattcctttctttggctgttgagacttgtatttctccatgccatatcagacaaattgcatttacctggttccctctgaattagcaatcttaggaacttcagctactctcagattctattccgttatttcagagttcccagtggttggctcaagtgtgagtgcacattcaggttttccagttgcctcatagcgtctttccatgaccttctcccttattccagctcctgcttgggtgtctctggcaccttcttaggacagatgtgggttgtccaatgctcaggacactgaatccagctcaagtacccaccatgagtttgatgcaaggcaagcgagccccaaagtggggcttagcccatgagggttcttggcttctcccaggaaagaatttaagggcaagccaatggtagggtagaagaaaacagctcttatggaagtggccgtgttacagttctgtgattgctcccacagagcagggctaccccacaggcagtgtgctgagagtagcaactcggggcagttctgcagtcatgtttataccgaccttgaattacatgtagattaaggagcagcttatgcagacatttctagaaaaggggtagtaactttggggtcatcaggtcattgccatgggaaggggtggtaacccccaggtgttgccatggcgatggtaaactgacagggcatgctggtgggtgtgtcttatggaaagctactcctgccccagtcctgttttagctagtcctcaacttggttcaggatctgagccccacctctggagtcgagtcccagttggtacctcaacttcaagtgaagaaagtcacttaattcagttttttgttgcccccttaccaataacttgaaaccatttgagtggcctctcatcctattcaaaactactcctttcccttaagcctaaaacattatccttggaataagcctcagcacctcgactctctccttcctttaggctcagagaactgatgactacttcatgccaatacatccttggcaagccacctagtaggctgccattcccacagcaagcccagcagaaccatcagagtcatggagtggttatagtttaggctcttaagttggaattcccaaggacactataacatagtgttcctgcatgggtgagggaaaaataataactggtttttatggagggctaggagaggtagatgaattacctggtgcaaagccggagtcagcatctgtaactgatgagtgagcaggacaagttagagttctatgaggaagctttatgccgtcactggcaaaatttgaggcagcaaaatgcaaaggaactcaataaatggtgagatgattaaccaatgaggtggtactgactccagcagtggtgttattgaaagttcaggtatattcaattataacacattttaaatcttggattgcctgaaatcagcctgccaaatatgagaataatccaggcagacaaggacaaagaacattacacaataatgatactaataggcagtgtcctgtacattgtaattgtacaatagtgacagtaataggcagtgttttccagcatcaactggagtatcatttcctatcccaagtaagttaaacacaggatgagctcaacatcctaaggtccagaggagagtggacggtagtgagttatgctgtctccctgtggtgcccagggactctctctctgtcaaagatgctgtatctaattacctaggctctttctttctcctttcctcctcctttcctccctctctccctccttctctctctctgtctctctctttctttctttatgccctagaaataagtctttttcttctttcccagaaatcatggtgataagtagaagcctgcatgcaggaaattattgaatataacaaaaaaacatagttggtgaagttaactcaagacaaaaattatatacaaagaggtaattgcatatagattagagaagtccagtgtattccctttttgtaaaacgccttctgaatcgagtatcttttgattccatacaattctgtctcccctcacatctgacctattcatgtcagagatctcctacctggctcctttttcatctagtaattaatttatatccctgtcctaacttctatctcctgctcccctcaacattatatctctttttataactaggatatactcaaatgaaaaaatccatgtatcttactatcttctgccttcttctaaatagttgtgcttccttttgatctatttatttgctacaccaggaatatttgacatttcctggagaagtaggaatctcttgtatgctcatttgaaatgagctagtgtggttatttaacaaatatgcagagcaacaatgcacaagatgatcaaaagatatacgtggagaaggaagttctctatttcacaccactgagttacattttaagcatggggcttgtgaactaataccactgttcaccttctcaaaagggcatggtatttaggaatggcattattacagttttctacagttttccaatagaagacattaaataaatgagagaacatttctattgggcaatattaaaacctttacttccacatccactgctttcgccagcttgaacagattagttattcccagtagattattctcattggtaattctgtaataaaagattctagatattgtgcattttcatcactggcattacaatttttatttcagaatcttggtcatcgaatattcattatctaattataataaaaatgcatgattcccttaggaatgcctataactaaatgaatatgaactttattaaaggaattaaattaggagattaaaattattcaaagggggtaacaactttattcttaaagaactgtaggattgcaatactaggaaagaaagagaataggaaaggcaacagaaaagtagtaaaaagaaacagaaacaaaacagatagatccctgatgtgctatgatggggaatagagtattaatttaattattcagttataaataaactaaagcctaagcctagtaaattatgtgctccttgaagattagagttaggactgattaatctttgcattccccaccagaccaggcagtgcctggaatgtagtggacactcaataaatttttgttgaattaataaggaagcaaattctatatgaaaatgataacaagtttatgagtactttttcaagtcagtttgcagatacaagtttaaggaaattcatactcggatatagttagaatgtgtatactgaattagaatgttagtctatgtgctttgggaattaattttgaagctcaggaagctatgcaagaggcagccaagctcagaggaagggtgagagacttgatcagctgcccctccctgtcttgaactatttcctgttatagatggaaatcatccttcattacctgggaaaaagtatgagcccaaagcagaattagccttctttatacatgtgttgaatttgtgttcccatcatattaagtattaaaggaaatgattatgagctgtttgttggacagtaaagggaagtgataatgataattttaatatagttaacattagcttgaaacacatgaaactgatatttttgtgtgtaaacacctaagtgaatattgacaatttcacatggtttaatttaatattgatcaaatgctacgtggtaggcactgtgctaagtaatgtatagtccattaatttgtttaaatttcatccaaaaagctttgtaatagatgaggaaattaacaataagttagggaacttgcccaacatacaaagaggacatagaaggtaaacagtttaacatcagagtcccttttcttaaacagaatactatcctgccagggaaaatatggatgtcataaattatgttatcaaaatcttgccttccaatcacttatttatgtcaacaaaaatgtgacaataagatataccatggttaattcacagtgcgaagtgtctgcttctagaaaggtgaaatttgcttataatacagttattattataccactgcaatatcgaggtcaagttctatggctacaaaatgacataatctttactcaagaaggtcacattgcagtaaagaggacataattataaagagtattacatcactagagttagatttttttttgttggtcaaatgactcaatccaaaaagtaggatacatagtaagaatgtgctatagagacaaagagataaatatctgaaaccaaggccccagaaaattaacaatctatgtcaaccataactgtattatccatgtgagtcaatttctatgggaaatacagttctgttatctatggataatacagttcttcctagaggaagaagcaattaattgatcttggaggggtcagggagagtttcatagaagatataacaactttacaaggcttgagggatgagtgggattgcattaggcagagaaaagaagaaagacatcctagaaaagggcgcaacatgtacaaacagaggaatgtgtgacagtaaacagtcacgttgaggaacagtaaatggtttatgtggctaggaggcaagtttgataccacattatattctgtattcctaaaacacccagacacgcgaaatgctgaaacagtaacttggactcttttgtgaagatcccaggactggaaatttctactgtgtcctagaaagcaatgataagccaacgatgctgtttccttctcgagctataactttcatagagggaagtgcacacatcttaaatggacagcttaggcattgttacatattagtatacccatgaaattatcacccagatcccttgcttggaagaccaaatgtcttttttcccccctcagaaatttattaccatttttcagaattaatattttctaaaacccaatataaaacattatatataaccattatggactgaactgtgtcctctgaaaaactcatctattaagccctaactcccaacatgattgtatttggagacagggtcattaaggaaattatttaggtaaaatgaggccacaagaatggggccttaatgcgatgggggtggtgcccttataagtagaggaagaaacacaggagaggttcctttctccactttagttcatggaaaggccatatgaggacacggtgggaaggtggccctccacaagccaaggagagaggcatcaccagaaaccaactctaccaacatgttgatcttggacttcaagctttcaaaactaccagaatataaatgtcgtctaagccacccgatccatggtgtctcaatacggcagcctgagcagactaatccaacagtctcgaagaattaaatttagaattggtcatcaagattttgttcacctcaaggaaataaaatgactcaatcctccacggatttgtttccatcattttcctttcctattttcagattatttgcaacctggagactgccctgcaaaagcacgtggcaatttccccttctggatcctcacaggagaaaaataaattcacattaacaaatattcagatgctttatttattctgaaaaaaataaaaaagtgaaattgctaaattgctaaattgagtttttcactggtcaaaatttacatagcccaataggtgtaggctccttactccttttgaggcattttctctctcttgattaacagtgatggatttttattgccccacttctgagaggaggatttatatgtcttttaatctgtgtaagttggactgaatcataaatggttcaccctctaaattacagagtaagtttgccaatagagatgaccttgtttattaaaatctaattaactgaagttttagaatgtccctgagtgggttgctgaatttctgattttctccaaaccaatatagatcaaatatccagctggctggagttaaccacaaagctctgaacctcactgtgaaattatctagttaattcctctttcagacattttttccaaaggtacaagcccaagaatcctttaatatgttggccatcctatttcagaaaagccatgtgcccaattatgagttggagaaagaagcccaggtgctccttgttcactgcaactgaaatgagaggaccctggagtgtaactttcattccccagcaatggtcagtcagaatgtctctgatcatgtgccacttttcatcttctggacaaagttctatgctgcctatacacataaggcagtaatattcatgactttttactgccaaccttggaaagcaatgttggcaaattgattacagacatatgggataaaacataattaattgattcagttcctagtctatatacaaaattgcttaatgctaaaactcctctagtttctgccctattgcttcttccatttctcattccaactttaagagtttaaggtttgtctcttctctctcatctcccatttaattatcagctattgaactttttcttcatgacattactagatccctttgtgtcccgtccaccgatgatctccatattgatatagctgatgtacatgctttaattttttgataacggacatttttgcaatatttaacataatataccacctcactcccaccccaccctccagaagctctctgttcccttggcttatagtacatataattcttttggttccttcagaattttagatcctgtattttcaacttctttggttcattcttcttctttcatgctgacactgacagtgctctcaaggctctttccatggctgcattctgacttgcatttagtcccagtcactgagagatattttgaagttctgtttttatttgggccacctcaccctgaagagtaagtacttttcattgttgtagctgaggtggtgtgcctttttcaaacgtctacgtcccacagcatcttcgagatattgataacataaaaacaaatatcgatcatcctaagggccttacagacttcagagatgggtaaaagaaaccacttccaccttcaaatcagtcttttgtatccactaggggagcaaaatgacctgctgagttgaagtgggaataacaaagtatctcaaagatgatgtgatgtttgtagagaaaagtttgtggcagtaatcgatacaggaatcacttatatggatctgtgttacttggagggggctttagaaatggcatcaagaagaaaaaaagcaatgcttcttggtttaaaaaataatgcttttatcattgaaaaatagtaccttttaagatggccaaatccccaaaataaaaattcaaagcatattgtacttccttctgaggccaaatgcatcagaactaatgctcttttgagaaaaccatgctatttaagcaaaaatttagggagtggagagtccgattattgtttttcatgagtgttgaagtctatggaaacaatgaaggaatgtacagaaagtaaattagataaagatttgatttataaaaattgtccaggtttagaaatttttatatatccaaacagaagtcatgaattaggtttccccaggctgtgaactagactaaggtggcatgtaccctcacattccaaagctgagtgccctctctgtccgtgtcacccagttaccctccttgggtgacataagagaagcccaacaattcctgggggtgtctcagagtccagcaggaaagatttatttgcagagttgagatgtcagcatattccgtctgcccacaaccatcatcaccatcatgggagtggactatcgctgtttagtttcaagggaaagaaacatggatgtgtggaatgaagccagccatgagcaacctttaaaggcacccacccaggggccatcaaggcaagagtgaggaggagtgtgaactgtgcagaaacagaggggagttgtcagtggctgggtgcacatggcattccagtttctgcacttatttattggttataaataacgcttcagaaacaccgagaagtcctagactattcactctaattttaaaagaatactgggccattataagggaagattttccccttgactacttttgagatgccaggagttggccattaattgctagatatgaaaacacatggaaatggcaaagaggctacacatcaagcattccctctactaatcatgcaaatgagtcatgatgtacaaaatgtaaggaactcctgtttagggaaaatatgaatgtagatgcacaaagtaaaatgtatgtagtccaaattagtcttctagccagtaaggcaattttcctatatgataaaaagaatggatttttatatcatttaaaggaaatacattgaaattattttagaatttaaaaaatgtaaacatgcatctttccttcttaaactctagagtatcggagatttgatctgtttttttctagctcagctattaactggttgaataccttagtctaggcattgttttattcctagtctattacctctgaaaaatgagggtagtaattagattatctcccaaaatattactgttctaattgcatgtggggaaattgcgtagaactacaaagtcttgtcatacaacctacattaactggttgagtaccttagtctagacactgttttattcctagtctattacctctgaaaaatgagggtaataattagattatctcccagaaatttactgttctaattgcatgtggggagactgtgtaggactacaaagtcttgtcctcaaagggctcacactgcatatctacgtgaagaaatattggcccagataaactaaccaacttacttttacatagagacagagccaaggtagggtttgcctttgcaaatctaagtcttgtacccctttcaccacgttaatgagatatggatcttctaattaaatattaatttctaaagaaataataagccccaattacagaaaaaaaaagatactaaaaatatttcaagagcattcaaggagcttcaatacaagaaaggcttgttgttgggtttttttcatctctctccattgatagttaagtacatacgggtagctattttagagctgcgcctagttaacgtctatgtttattcatgtatttattcaatcatgaaacacgtggagccggccacttttatttgaatccactttaaataaacacttttgtgttgattgtacaaagttccatgaaacaatatatctgccctcagggaacttgctttccagaaaggcaaatcaaagaaaaacgttttgcaaagaatcccgaaatggttacaagggctttctaagagaagtctaaattgaacagataattgtctcacattttgtaaaaggcctagactattctcactgaaaagcagtaattgaatctgtaattactttcatttcactggggacataggcatggattctaaagatctcattgtcatggttgttttcttaatcactctcattgcttcctagcaacactagcttccttccttccatgcaggaaagctcaacagtcaatggtgggcaaggacactatgagaaacatttaatggcacccacccaaggcccatcaaggcaagagtgaggaggggtgtgaacagagggacctgccgcttatttgcctttctgatgatccagcccctgtttgttttatgaacaaaggctttaacttctgacatagaagcgatttttgaaaatgaacgtaaaggaactggcaaactcagcccatgggtttcccttttaagaacatgaaatcacctcctcataatcatttcagtgatgccaggaacgttcctctctctctcccattcaccctccaccattcacagagatttgatttctagaattttgtcaaaagacaaaattgcacaaaaaattaaagatctaattggcttttattagcaattctcaaattgggcaacaccccactctataaactggaatagctgtcccagtgccctgagtagaggagattggctttataggcagaaaaggtctgaagaaagcagaaacaaggaataaaaagtggattggtcatttcaaagttactttccttgtagggttaaaacagggggatctcttatcatgccagctcaggcaaactggtctccttctctctttttggttttgacaaaatgtcttgctctatatggtggtatgatctcagctcactgaagcctcgacttcctaggctcaagcaatcctcccacctcagcctcttgagtagctgggacgacaggcatgtgccaccatgcccagctaatttttagtatttttggtagagacagggtttcgccatattgcccaggctggtcttgaactcctgagctcaagtgatcctcccatcttgatctcccaaagtgctgggattaagggatgagcccccacgcccagccaaactgggccccttctgattgatgactatgactctcctgttatttggaaaactggtggctttcaaagttcacgttagttatgtggcacctagcacaagtgattgcatgttggtttggtctgagttgttgggacctactgcagggcctactccaaaacaatggcctcccataaaccctgtatgacagtctcattaaggcattgcttctacttaactggtttgttaagtgggaggtttaaggtttgtcacctttttctctgagagcaggttttagtagagacttggacagagggcatgtagcagagaggatacagaaagatggagctgagaacaaaataaatacaataaactaaaaattcgccatacttttaaaaatatttaacaaaaactaactttggcttgagttataggtttcctctcctgttttatgtgcattagatacacacttttaacaattagatagtttttggtattaaccatgaagtagcatcttatttctgggtaaagtctgtctatttttttaagttgttttaaacttttaaaacattttttagttatgaatttattttattttattttattttatttattttattttatttttgagacagggttctgtcacccaggctggagtgcggtggtgtaaccttggcttgctgcagcctcaacctcctgggctcaagcaatcctcccacctcagcctcccaagtagctgggagtattgatgtacaccaccatgcctggctaattttaaaattttttatagagacagggtctcaccattttgcccaagatagtcttgaattcccacctcagcctcccaaagtgctgggattacaagcatgagacaccatgcctggatgtgaatttttatttaagagatagaaagaataagaacaacccaaagattatttaatagaaataactagacattaatcaaaaatctttagtgtaagccattagtaaaataactttccaggaaaattcttataggtttttaccttttgacctactttttctaaacacttgctatggaaaaagtacagtgtatttgaggatgattgttaggaggcagaaaaggtggagaaaagagaggctgggctcagtggctcatgcctataatcccagcactttgggaggtcaaggtgcgcagatcacttaagtcaggagttcaagatcaacctggccaacatggtgaaaccccatttaaaaacaaaaaaagatggagaaaagagatacaaagatttagaggtaaagtgaacttaattgtctgaacaagaaatcaaacaaaagactccaaaaagtttagaagccatccttgagatgcagatttaatgctaaaaatgttggcattttcagaatattacaatgatgaatgttgacagtcaaacagaattttattgttaagcttgtcctggaaaaaccaagaatgtttgattgtctgtgattgagacacagtccctaaatctagtttggaaaagtgacagatgtttcaggttgggatacaaaagacaaattctaaataaggaatgaaggagagaaggaaacatggaggaaattggtgggacattctgtgccatttaaatatcttgactcttgttaatgaatgtctatatagaggtcaaaggtgaggaaaacagacaaatcatgggtatctaagaaaggtgtgttttctatccaggaagaaaggtcaatggaatacataaatatagtgatataaactttaaaggtaggaaaagcccttaaaaacagagtcagtaaagattttgtagtccctggttcatagtcacaaagtagaagacaccaaagccaggaaatacaccactttgtagttcattaccctgctacttctagtgagatgtgtgcaaaacacttgtcagaccttattgccaattggcatttgagactatctacagttcttttttttaataacctcattgaagtataatttaaataccataatattcatcgattttaactgtacattaactgtacaagtgtacaggtttttttagtaaatttttagaaaattcattgagttgtgcaacaaatcaacacaatcccaacttaggacatcaacattatccctatacgattcccggttaccatgaatttctgtttctactcccagcccgacaaccactaatctcctttctgtcctggtagatttcctttttcatatcagtaaaattagaatatgtgatttttttgtgtgtctggcttctttcacttagcataaggtttttgaggtttgttcatgttgcaacatgtattcagatttcattcctctttattgtctaataatatttcattgtatgtattaccatacttttatccattcactagttgatgggcacttgcgtgatttccactttgggcctcttatgactaaatctgctataaacatctacctaaaaggctttgtgtgaacatatgctttcatgtctcttgtatagatatccagaagtagaattcttgagtcatatggtgtgtctatgtttaactttttaagaaactgccaaactgttttcaaaaatgactgggcacagtgtcactttagtgtaatccaagctacttgggagctgagacaggagaatcatgactttacagcccaccccccgagcaatgtgtgatgattccagtttctccaaatccttgtcaacacatgttattgcctctccttttgattatagctatcttggtagtgtgaagtagcatctcaatgtagttttagttacatttgcctaaggaatgatagtattaggcttcttctcatgtgtttatgttgtatttgtacttatatctatgagatatcttctgtagctataactttgacttcctgaattctgtccagaaatttctagtttgggtgatgctgtgatggaaatgcatgaaagtatgcagagtaaacattttttaagggttactaaataatcctgaaacttcacaaaagagaagtccatctactctgctagaattactgtataggaaaactcagtgtaatcattttcataatatttggtagaagagcaggcttattgtaaaaactggggatgtttatttttctttagggcttcatttttctactttttcattaagctaaggataagattaaactgcctggaggcttctttgctttctcagcacaataaaaaagtcaaggaaagacagcaaagcaagacagaattcttcagaaaaacaatactgaagggaaataacagtaacaccaggttagagaaacaaaatccatagaatcaagctttacttgagtaacaatgctgatggaaatagcatgtaagagtcttagttcagggcctattggaaatggatgatagaatttttccaatgtacaagcccactaacagatataattagcttattatgctaacatgataaatagttactgaatatctccctaaattagattgacctcaatctgtaaggatcgtaactttcaacaaaggctcgttttgcttgcaaaaagattcacacaagatgctcagatggacaacataaaggtatttcagaggacccctctccagaaaccaaattggttgtggaggctaggcacagtggttcacaccgtgaagccaggagtttgggaccactctgggcacaaaagcaaaagcaagacctgtctctacaaaaaaaacatttaaaacagtgggcgtggtggcatgcacctgtactcccaactactcaggaggctgaggcaggaggatcacttgaatccaggttgagcctacagtgagctatgattgcaccactgcactctggcctgggcaacagagcaagaccctgtctctaaaattaaaaaaaaaaaaaaaaaaaaagtaggttgtgctgtaggatcacaaaaactttgtgctggttaaaccactttactgcctttcatgaattagtttccacaactaatgtagagtccgcttctttgagagtttcacatgccattgcttgtggctttccattctctggatccctgtttagatctttggtcaaaagtgaccaaggaggcatctttatactattttctccttttattattttctcagctgacaattctttccctcttttgttgattgggtaaggaatatctgagtgttattactactagctatacggcaaccttttataaacttcaatatagcattacaaacattggttgatttgggcatgaggtagttctagaattcttttttgcttagtatggtatattgatagattaggggtaaatgtgaataaaacattgcagatatctttgaatttatgacttacaagtaacctcaatatttcagcctagctaaagacatctttaaaaggtaattttcacctcatctataaatgagagttaaaaggaaaattcttttaatttacatagtggtgttttggcttatattctgttttggtttttcccctttttaagacgaaaagtccaaggaggggatccagatagtgtgaatctgaatccagactgccactggtaaactttgtctagctaaattctctgattctcattcttctcatcagtaaaatgagaataatgtacattatctcacttaatgattattattctcacttaatgaatcatgatattaaattttcagtatcattgaccaataatgcaaacattttcataaaacgtggcttataaatttctatcatccctgatgttaatcagtttttcttgcaaaataattaagtaatgcctgcttttagtattaaaaatttttttaagttcaaaacctactaaaagtctacatttataaaattattacaaacacttaaaaattatatttccaaattatgagagtgtgtagatatgtgaattcctataaggttatacacatatcaatttgggcaatacaattacataataattggaatatttccaaacacttgttttaaaaatgctttctcctagcactagtttcataagaaggtagtacactgtcactcatcatatataaaccaacattactggctgggtgtagtggctcacacctgtaatcccagcactttgggaggctgaggtgggcagatcccctgaggtcaggagggcagatcatctgaggccagcaccagcctggccaacatggtaaaaccctgtctctactaaaaatacaaaaattagtcaggtgtggtggtgggcacctgtaatcccagctactagggaagctgaggcaggagaattgcttgaacccaggaggtggaggttgcagtgagtcgagatcgtgccattgcactccagcctgggcaacaagagcaaaactccatctcaaaaagaaaataataataataataaaataaaccaacattaccaagtgctgacaatgatcttgagcaacctgaattttcatacatccctggtagaaatgtaaattggtacatgcttttgggaaaactgcttgaaattatccactaaaattaaacatgtgtactttatgacccagcatttctacttttaggtaaatgcttgacataaatgaaggctaataagtaacacatctataagaacattcatagcagctttattcataatagccaaacactggaaacatccaaatgacaatagaatattcattcttattgttgtattatattttatttatataatacaatcttttgtattatataatacaaatacatgcaacatgtattatacaattttttgtattacatataatacaattttttgtattacgtataatacaattttttgtattatgtataatacaattttttgtattacgtataatacaatttttttgtattatgtataatattttttgtattatatatactattttttgtatcatctaaataaatatttaaagttgggtagaaggagctaggcacaaaggaatgcatagtgattccatgcacataaaggtcaagaacaggcaaagctcatctatgatgacagtagacaaatttatggttacttctgatggagtgtactgattgggaagggcatggggggtgcttctagggtgctggagctgttctaaatcattatgtgggtcatggttgtacaggggtgtgtgtgtgtgtgtaaaattcattgaactgtacctttcagattttcatgatcattattcatttcattacagaatgtcatagagattccaccatttaaagaccttgtttttataaaattacccatactatcttatagatgctggaagggttaaacaatgagagtagccacaagtagcagagcaccttctcttcctacaggatagatctcacttgtaccaaagctgacatatgactgcctgctatgtaatgcacagtaaatttaaaaatttattattaattaaatttatttctcactgttacaataaataaattgaagtgtagatggtttctgtcctcttgcatgtttctttgcatttattctcagtacatatttttgccccctctttggtcccttcccaaaccccttgctcaactttggaaacttgattgagttacacaacagttgcctaccatgatagtcagtgggatatttgctcaataaatttctaaagcaaaaatggacaattatgccccattatgagttagaattggcaaactctataaaggaccacataatatacattttagactttgggggggtcttatgtctctgccatagcttcttacctctgtagttgcatcatacatagacaatacatttttttaaatggctgtatttcaataaaacttttttatgaacactgaattttatagcatcacaaaatattttttcatcttttttaaaaccatttaaattgtgaaaattattcttagctagcttttgagccatacaaaaagaagtgatgggcagaatttgggtctcaggacttagtttgcagagctctgatttagagtcatgtaattttaagtaataacttgaatctcaaccttcagttccatcatttctagtaggttatcaaattaccatatgctgttagagagtgcttttatttattgttcctttaagaagcactaaatattaagtttaatatcaaaggctttgtttcctctttggcatgattgtaattcataagacttctaataaaagagggtgggtttgtaaaaaattccacagatatttgaggcctagtcattagtagctacagtgtcaataagaatcacagtacttttctgcattatcttaattctgatttgataaataattattttttaaaaacccttcattttgaaaacaatgaaataactaaggcagtatataatgcatttatttgaggccaactggccaagttctgtgactccttcctgggtttctatgggtcctgacacatgaggaaacaaatattcactgacattcaagaaggtcagaggtacaagtaactgctccacactgcatagcattttcaagacaggcctccaagttggttcctctccattccctgcactatttgctaagagacatgaatgataaatctttacatcattgaactgtctgtctcattctcctgtcatccaaaaatcagggtgggatttttctgatgagttctatgtgcaatttcaaaattgttatttctattcagactgaatagtaaaaaatcatctgaaagggtaaatttgaggaatgacatcacactgctttgtgcctcccacccattcactcccaaatgagggatccctcagccacagcagcagaaaaagaggacaaaaggccactgattttccatgaaggtgaaatctgtgctgcacgggctccaaaactcactgcacataactcatcttaagcccatctccaggaacccctcctgggtttctatgctccattctagagtcagtactttgcaactagccttgtctttcctcctttaggatggatacagggtagacttgggagacctgaaacaagataaatatagagtcaacagaagaacaaactcaggaggaaagccaactgggctcaaatctcggctccactcttcattgtagatggaaatagacacttattgaatacctgttctgtgctggaaacttcacataaactgttccagttgttaaactaaacaagaagagaggaaggaacaaaaggtgtcccttatttaactcatgtacaatagggaagaaaacttctgaaggaactgcttcaaatagggttttgtttcacatattattcaagcgaccaggttgactttgttgaacttctgattccatgacaacagcaaactctgcatgtgtgctcagggtttgacatgctgtggtgtactctctacctaaaagagtacgcagcataatggttgtgaatctctggaaatcagggtgtcgcttctgttttccagaagatgaagatgccagaagggcttctgagcaatgtgctatgagaccacctatggaagagagagaacaactctttaactgtggctttacttagtaaacttccaaacgattactgaaatgtcatcattagacaacgtaagcaactagcagaaaattcatatgtctaatgcagcctcctcattctttttctgtctttccctgtgatccaggaggaaggatgctggtttcttatcatacaaagatcacctgccagtgagccaagtggtggttggagatactgaccgtcaaggctcagaagccaaattgagcgtaggtcctctgcgctgccaaggagacagtaagtttgcatagcagctatggcttgcactttcttatcccatttaaatattgtttccaggctcctcagaagatgcctgcaatcagacttgctctcctgtagctcctacagaaacatcacacaacccaagcagagataacttagaggaggggaacagccataaagcctccagtacaggagccgagatttgggcataaagtggggatatccatctttcctctatattcatatgtaacaagtttgactacctaagtttatgatgatattaatagcaatgctaatagcataaatgcagtactcaacagctgtgattccacggagtgctgctgttaatgccattaggatgactatttatatcaccataaaccgagtttatggtgatataaatagtagcattatggcttaatgtatcattgtaaacttggattatggccatataaagtttgacattattgctatcaaacttcatcatcatcagagcttgatggtcccttgtaagccaaagattgtttctgttaactatgtcttgctttcaagattagtcaccccagagaggaatttggggctgctagcttggacagtgggaggtaagggagttggagtgatggtccctcctaattaagggcaccattaggattttatgttgtttgatacccttcggtgtgctttatgtgcagtcagagggaaacagtgacatggttgcactgtggggattctgcagcgagcatcctgggcatcgttttctctcttctttctgggacacgtggtttaggcaactctcctgagagttctatgcttttgtgattgtgtgctaggcatccggagacctagattctgctccccaaatagctgacttgccaggagacctcaggcaaacccctccattgtcttagctgtggtaatgagaataccacacacatcccaattcctcctggggaggctgtgaatattttagtgcctggatttggattcctcctagcaaagcattatgtgagatggaatattattaccactttgtaaatcaagggagaattagacctacttgataataaattatagcgtccactcaaagagatgtcctaaggaacgtaatgatgcatgcttaacagtttcctacttagtaaattgaggttgtcagcaattaagcaatgccatgttcctaatacaaaagggagatggactttgtactgatttttctctacttacattgaaaatgctacctgtaaaattgagactggtcaagatctttatcacgcacttattgaacaataatacttcatttgtttagtcaggcttagtaaaactgtgcagaagaaatttaatttcaactgcctaagaaaaggatattcacctaaagcaatagtatatatgcattttaaacaaatattataagaaatgaaatacagtgttgctctaaaattaggaagactgtcatgtgttgtctaatgaaaatcatttttgttatggaataattactcattagcatataaaggtaaaatatttctggcttaccgattctaattctgaagttagctttgaatttgagaaagtgttcccattaaataattgattaacttaatatatttataaaaattccacttctgcaaactttttttcttgtctgttttgttttgctttattttctttttttgagacggagtcttgctctgtcgcccaggctggagtacagcggtacgatctcagctcactgcaacctccgcctcccaggttcaagtgattctccagcctcagcctcccaagtagctgggattacaagcacacgccaccatgcccgactgatttttgcacttttagtagagacggggtttcaccatgttggacagactggtctcgaactcctgaccccgggtgatccacacgcctcggcctcccaaagtgctgggattacaggtgtgagccactgtgcccagccttctgcaaacttttattaccattcttaaaaaaaagattctaggaacattaaatagtagatgctgcagtatatgagcactttataattaatattagcttatttgttcttaataaatcagcctcaggaagaatttattgtgaggctgtcattcatctagaactttcctaggtgctctggaaagtaagaaaaagaagttcaaaccatgttatgtgaaatgaacatgaaaaaatattggaaaacacaaattggcttataatttaattttaggctttgtaatataaaattattgcaactgataatcaagaaaggagccatagaaggtgtatttcaggcagactttctttttaaaaaagagaaaatgagaaaagtatagtggtcattgttcatttgcatttctattctagggctgttgttcttagaaacatttttagaacctattatcaaaataaacttatttattcacattacatgatctcagtatacttataattactgtaacttcagagaaactcttttaaataatattttacctgatatttcatgaaagcaaaagcagtcaacagttaatggcaattatgtagaatacttttgtgtctgtgtgagagagagaaatctcattgttttccaggcaaccgagaataagtatcctacctggtactcgaattgcctggtagcagtcagcagttgtgaagcccatgttccctttaagaatgttctcacggccgggcgcggtggctcacacctgtaatcccagcactttgggaggccgaggcgggcggatcacgaggtcaggagatcgagaccatcctggctaacgcggtgaaaccccgtctctactaaaaatacaaaaaaaaaaaaattagccgggcgtggtggcgggcacctgtagtcccagctactcgggaggctgaggcaggagaatggtgtgaacctgggaggcggagcttgcagtgagcagagattgtgccactgcactccggcctgggtgacagagcaagactccatcttaacaaaaaaaaaaaaaaaaaaaaaaagaatgttctcacatggacacagtagtgatagagtgttccgtatcaactgcattttccagtttttatacatatgtgatctccctggttacacacagcctcctgtgaattgggcagggcaaatattagtctttctgccttacaaatgaagaaaatacttctttgaaaatggcatttacacagcaaatttctgagcatactttcagcctctgagaggcttcaggacaaaagatggaacagagaatagaaatagctgtgtctgtacaaggtcagagttgttttcccaactgtactctcatccctgagccaattgttgattaaattaaaatgccttaaaatgtttcatttgggttttatcccaccactagcctcagccacacatgtcagttaccaacatagtacaaacattatagggattacatttatgtaatttaaaaagtggcatagtgcatttttcctgctgtttatagagatgaacttactttgtgtcatttactgaagtctgttcaaacctacagcttataaagactaaacctattgttgaaaaatatctttcagtttgaggagttgagtgatgacagccctcagaacctgcctcttgaattaggccccagttccatcctctagtctcagagaatgaaaccatttttgtgggctctgcccaaccatttcagcagttttggttgatttcatcatgcctgctgagtttcatttttgctttgattcgtctgaactcagacccatataatcaaaatgctaaagaaaatcagtgcatgccactcagatctgctgcatttcccatatagttctgtgaaatgcttatgtccttacaggtgtgtgtgtgtgtgtgtgtgtgtgtgtgtggttttttttttctttcattctttcttttttgcaaagcctatccaaatggaaacttcaaatcaaatgacactgaaagtatgagtggtgacggatggttcgctgaaataaaaagtgctgtgaaaatacaaatccccctcttaaactacacgtacgcacctagaaagaaacaaaagaaccatttggaagattaaaaatcaatgatcaggtagacattgtttcaaattgaaatatgtaatcatctttgcagatggctgccaaactttcatactttcatgaaattagttaaaaaaataaaagacttccactttttggaggtagaaatctcatactatatatgacgaatataattaattgtaggaatatagtatttgctagacaattgctttattttcagccatatgatgtaaaactttactgtactcctctagggatacggggactgtaaataaatactttggagcaagtttgtcagaaccataggaaaggtttaaaaaaaaatcaaatgttttcagtaaacctgggtagaaacaattccagaaaatgtcttattcaagggcttcttccaaggccatgccagaaacactggctgtgaagctggcagacagagcactggagtcacactgcaggattaagatgcaaattcagtttctcagagctacggaggtgacccagagagacaaggaaggaaaggcaaggcagtagtgacacatctagttctggaacactcagaggacagacaaagctgtgtgtaaacaaataaagatactgatggagattcatcaagatgatggtgaatatttgttctttgggaaagttattttatgtgccagactaataggaaggccattatcttttttttgcaagaattttacaaaccaggatcataacctgccattcccttgacaggagagataagatggccaggcatggtggctcacacctgtaatcccagcactttgggaagccgaggcaggcagatcacttgaggtcaggagttcgaggacagcctggccaacatggtgaagccctgtctctaataaaaacacaaaaattagcagggtgtgctggtggccgcctgtaatcccagctactcaggaggctgaggcaggagaatcatttgaatccgggaggtggaagttgcagtgagccaacatcgtgctgttgcacttcagcttgggtgacagtgtgagactccacctcaaaaaaaaaaaaaaaaaaagcaaaaacagacaaggcaataaggcaatgcctcggtctccacgttgtttctgtaccaatgaaacatttccaacaggggcgcacatggcagtaactctctttcagaagataatacccacgagcatacataggccacatactctgtgcagtgaatagggactgaaggagaaaccacttctcatctgggttcaggaagcaattctccttattgagaggaagcagctctccaggctccagagaagagttcaaaatttatttatctcctttttctttgctgcttcaggcttggaaaaggcaagaaaggaaaagggactagcatgcaggttctaaaccaatcactttcgattcattttctctcttgattctctcaacatcccttaataggtgatactgttgacaaaaaaaaaataaaaataaaaataaataaataaaaaagtaccctgtaaaatatttaaagaggtttatttaagccaaagatgagtggccatggcccaaggtacaggctcaagaggtcctcagaacatgtgtccaagggctacaatttggtttttatatgttttagaaagacataagacatcaatcaatatatgtgaggtatacattggtttagtctagaagcaatgtgagagtgtggcttacaagtcataggtggatttaaaaatgttctggttggagattggttaaaagagttaagttattatctgaaggtctggaattgatagaaaggagcatctgggttaagataaggggttgtggaggtcaaggtacttattatgtagatgaagtctcctaggtggctgcccttagagacaatagatggcaaatgtttccatttagacctttaaaaggtgcttagactctcagtaaatttcttctggattttgagggcctggaaggggaaagatctagttatgttgatagagattattcatagatgtgaattttcccccacaaaaaaactgcttagcagggtcatttcaaaatatggcaaagaaacatgtttgggtgtgaaatctttttatttcttcctttttctgtcatgtgatgttatgctagagtcaggttaaaatttggtatcttattgctacagtctgtaaactgtcatggccctggtggaagtatggcagtgaggacaaccagaggtcactcttgtcgccatcttggttgtggtgggttttagccggcttctttactgcaacctgttttatcagcaaggtctttgtaacctgtatcttgtgccaacttcctatctaatcctgtgacttagaacttctaaccacctgggaatgaagtccagcaggtcttagccttatttcgagatggagttggtgcttagatttttagttttggttcacagtacctttgactccagtgtactgatgaggaaacagaaacaatgttattaggtgctttgccaataagtttcagagttcagactggaatctacctagttccaaagtcctcctttctactctattcaatcagagctgatgttaggataaaaatgggaagaaaaaaaaatctcttatgctctcggggagtggctgggtctagctgtttgctaatgagggggtctagggaaacatccctattgccctgtgaagggtcactgaaaaaccaactcacaaggcaggttaatagaagaaaaggcatgcaaattttactacagggagaatcacagaatgatttctcaccccccaaaggagttcagaagcttatatatcatcctggaaaaacaggttttgggagcaggggaggagaggaacttcactttcactgtcaaaaggactatttactggctgggcgcagtggttcatgcctgtaatcccaacactttgggaggctgaggcggatggatcacttgaggtcaggagtttgagaccagcctggccaacatggtgaaaccccatctctactaaaaacacaaaaatcagctgcgcatgttggtgcgcacctgtaatcccagctgctcaggagactgaggcatgagaatcgcttgaacccaggaggcagaggttgcagtgagccgaaatcacgccattgtactccagcctgggtgacagagcaagactctgtcaaaaaataaataaataaataaataaataaataaataactatttacaagttcatctctgttcctagatccatttattctctctggtaatcccctcaacagaattcctcttctctccactcccataatctatttttccaggatggtaaataagcttctgaacccccactgggggtggggggtggggagtggtaatccctctggggctctccttggttctccacatgtacatgttaaatcaatatgtatgccttttctccatttaatctgactcttgggagttgatttatgtttttactttttttttttttttttttgcgaatcttcagagggcaaaggggaagattccattggctcttacactggcaagctgtgtcttctaacttactcttacatgaagggctggttctgaaagcagagataaaaaaaggataggtgacaaaaactgctcccagtcccatgcttagtggagaaaagatcccccttgattttgcacccctctttttgacaagtcatcaaacaactgatctttttccacttactgcatctattttggctcccctaacagtgtacttcttaaaagtaaaaacaaaatctaattcacttgtatattctcagtagtatcacatgcctaacacctagaaaggattcaacaaatgtttgttgaatgaggaagaaaaataatacatcagagcagagggagagtgataatgccaggtttggcctgaaactcagcttctgcccttagggcactcatcaccccaagcagagaaatctcagggcgctggggctttggagttctctaatggagccacaggtgctgggccaactgacttcctacatgaaatctggattttagaccctgttttcctagacccctcatttcctgcttgggtacagctcttgcctctgccttttcttttttaaagttttcattacactgtgtactgatttctggctcactttgcttccctactattgttctgaaagcttatctctgattcagccccacccagaaaagagaggttgcctcaggcaatctatgtaggatgataataggtgtattaccagcatagaggaccactttctctctgtctctccattcctgccctggccattaattataatacattcgatttacttgggtttggtcttcagccctcatgcttttgcaacatcatgatgggctcatacatgatttttaaaaagagcattaacatcacaaatctcagaatgggtaacgtttgatcattcccagtaactatttcctgagaagatgctctaaattgtttttctttccccattttttcccacaaaatgtggctgtatatttttgcctcacgtatagctcaaaacaagaccaagaatcacagtgtcctaacagtggaagcgtcttagagatcaaccagtgcagaacctctcattttacagatcaggggtctgggtctagagaggttaagtgactggcccaaggtctcagagctggtatacagcagagcacatcgagaaacagtttaatacagccttcatccttagtaattccccagggccaagatgaatgttgacacccaaagaggaaactttgacctggaacaatgaccttgggtctctgcctatcaacagctgagtgggtatcagaactcttaatcttactccatcatgagatcaatcatctggaaatcttgatagaaaacctacagccacagaagtgagggtcagtggcagaaagttgatgacttctgtttttttgttatgttttttgtttgtgtgtgtgtgtgtgtgtgtgtgtgtggttggttttttttaactttttagggttgataatagaaggcatgaaaaaaaaaacaaaagcaaaaacgccctggagtgatgtgtagaaatcattaagctctattttttcttaatgtcccagccttcactgctattgccatgggctactaacaactgagaagcagtagtgggtctaagaacaagcagaaatagtgaaattttcaggatcacaacctaggctgactcccattaatggattgagcccaccgggcatttctgaggtcaggtccaattacaaatgctgtagcttttacaagtagatggaagccttcccttttatcttccagattccagagtgactttaaacaattagaagaaatggacaattcctgcgaaggaaatcagctctttaagattactcagttactcaacttcagctgcaaactcactgttgaaatgggacgtaaaattggttacagtttggaaaaaagtctttctgttttacaattgacatgatatttgtgtgcgtgtgactgattttcttacctgtcctttcaaataccatttgtatttggaggaatcgtcacatgccacagaggaattaacgtgaatgagctgatgccagacttggttctgcaggtctgtgttgtcaacaaagagtcaaattctgtaaaatatttgaagacatttattctgagccaaatatgagtgaccatggcccatgacacagccctcaagaagtcctgagaatgtgtgcccaaggtggttgggacacagcttggttttatacattttatctattttatgttattttattttatattttattttttgagacagagtcttgctctgttgcccaggctagagtgcagtggcatgaccttggctcactgcaacctctgcctcccaggttcaagtgattctcctgcctcagcctcccaagtagctgggactacaggtacatgccaccacaccccgctaatttttttatttttagtagagacagggtttcaccatgttggccaggctggcctcgaactcttgaccttagatgatccacccctctcggcctcccaaagtgctgggattacatgcatgagccaccacgcctggcaggttttatacattttagagaggtatgagacatcaatcaaatacatttaagaaatacgttggtttggtccagaaaggcgggacaactcaaagcggagggtggtgggggtaggggttccaggctataggtgaatttaaatattttgtgattgacaatttgttgagtttgtctaaagacctgagactgatagaaatggaatgttcatgttaagataaaagattgtggataccaaagttcttttgaagtcttatagtggatgcccttagagacaatagatgacaaagtttcctattcagatcttaatctctttaggattgggagggtctagaagaaagagatctagctatgttaatagagattctttacagatgcaaaatttcccccacaaagaacagctttggaggcccatttcaaaatatggctaagaaacatgctttggggtaaaatattttgattttcttccttgtctcataatgttatatgagtcaggttggaaaataagtcacaatatataggttaaataaaacccatctgatgaaaatttattatttgtagggcatgactccccacacctcttagataggaatttgggcaagacttaaaaaaaaacaatcagagtttagtcctcagtgtggctggatgggttctgcctcctccatgtcctctctctgggtgcctctcccttcctgaacttgttactctctgcagaagaaacagcatccccagatgcaggcgggagatttctctgcaaattgaatccccgtaatttggtttctctgctgaactctctgaccaatctctcaccatttgaagagaattagtcttggcctattggatctaaacatccacagtgtggagcatactttggaagtgacagaaacacggagtgaaatagagtctaacctattccaggatcagctcctgaaaacaaattcaacctaagagactttattgagaaaaacgagacatggctctgatcctggatcagtttatgtttcagtgagggtgaaaattttaacaaagtggaggagattaggatggaagtttggattcctagtgggactttgagtggaaagctgagaggcctcatgtagttgtgctttacaaacattaatgtacttagaaaccacctgagatcttgttaaaatgcagattctgattcaggaagtctggagcaggacctgagatgctacaaggtgtggctgctgctagccaacaggccacgcttaggccagcaaccttacatagcagcatggtgaacagcacagactttggaatcacacccacctgggtccaaatcccaactttctccctcactaaccatgtgcctttggacaagttccttaacctctctgggcttctacttctcacccagatccttacctcagctgcaaatgagaataattgtaacatcactgagtttgctccagtaaagcctgattgtccccagtccttgcacatagtcagagctctctaagtgttagccaacatcatcattcttatatccatttgctgtggaaaaagtggcaggcttgatatcagaaaagctctgcccatcttcctgctccatgttcctgtccctgtacccttgacttcatgccttttcttggagaagacaggcctagtctcaggtgacagtgtagcatccagccatttagcttctcctaatttggaggtgctggccacaatacctgattagagctcaactgcattttctgagtccccagggacaatgtccttccacataagcaatctctcatttccttctcatcatgtggatctcagcttcgatgttaattcttctaagaggacttctttgtccactcagctgacatagccactcacacctccctacagcccttcttaattttcttcatagaatgtgccactccctggaattatctctgcaatgcacaactcaattctgacaccaactgccctgagttagcacagccttcacaagttaaaagcacagtccccaacaaaacagccttctcttcacacaccagctgcaaacttgggtggctctcaagccactcacatttctgaccaactgactacaaatttggggttgctactattctttcagggtcaataattcactagaatgactcacagaactcaggtaagtgctatacttataatcagagttttgttataaaggatacaaatcaagtctagccaaatgaagagatgcacagggtgaggtcgggggaagcttcagagacaagagcttgcatgtcctctccctgtgaagtgagaattgtaggagttaaagaaagaggaaagaaacacaaaaggcagctcaacagtcaaagacaggtttattttggagaacaaacctaagaggggcttctggctgatttcagtcaagagcactctctcttacagactaagagtatttaagggttttagggtgagagagcttatcacaggcttggactgtttctgtgtggaagagaagtttattgcagggttgaaatgtctctggttggaggggggttatcttggggctgacatctctccggcctctctggccagaggggagattatcttggggctggcatgtctctggctggggaggggtttatcttggggttggaatgtttctgattggagatatcatttgtggtttatggtcatgctgaccttagcctgatgccctttggacttaggcgatttttttatcaaggggaactttaaaatggcggtgcttgtccaagatggtgatgctcctgctctgtcaagaattccctactcttctggtacaccagtgtgcatcaccaaccagtgacgctcacccaggctttgggtgttcaatgatttattgggatctcattctgtaatcatgattgattaaatcattggccacatgattaaatataatgtttagcccccttttcccctcctccctggagatcaggctgatatcaggaagctcaaagcctcaaccctctatcaggtggctggtcttcctggcacacccagcccccatcctgaaaccacctaggggcccaccatgagtcaccttattggcatggacccaggcatggtccctggcgctcactatgaataacaaacactcctatcacttgagaaagtcctagggtttagaaacttggtcccaggaacctgggacaaagaccaaattaatgacctgttatgagtcaatctcttttctctatttatttgctttattgtcaccattgtccctaacagtagacgggaatctcaggcagaagtctgtatcatggtgccaaggacaatgcctgccacattgaggcactcagacatgtgttcattaaattaatatgaatggttaaataaccacaaaagatgatttaaattagcatttccaagtaacaatggaggcagtgcatgaggcacttcatgataaattgcagaaaacttgcacagacaataattgttataaaggtccaagagaagcactatcacttgatttatatgcacaactatttttaacctcaacagggttttgcacatttattcatcttaactaaatgaaaacttttattcctttgtaccttgaaaatcccttgaatctgatgattatctttaaattaaggattaaaaaaaaactcttttgctaagtttttatacattctttggcaattctaaattaagatgcacatgaagtattaaatttatataactcattgtttaatctaaattagattaacccccttggcccttcagagatccaagtagaggcttccatacttttgtttatccatgtctcaaggttattactgacaaaattacaattagtcagtacttcatgtccattgttagggtgctaagctgtgagctataaactacctcactctggcataattaaaaccgtgttccagttcacctattttatgatacctacttggctttccataaagcttcttttcacactcctaactatgtgcaggtctgggaaacttgggaactttactgaagaaaactttaaacataagcttcttcttgaagtttgctgatagttctgttatagcagtcttactatcatcaggataaaaaaattgtactaaactattgtaaaaacataagatttgtattactacctctttttttttttttttttttttttttgagacagagtctcgctctgtcacctaggctggagtgcagtggcgtgatctcggctcactgcaacctccgcctcctgggctcaagcaattctcctgcctcagcctcccaagtagatgggataacaggagcatgccaccacacccagttaatttccacgcccagttaatttttgtatttttagtataggtgaagtttcaccacattggccaggctgatctcaaactcctgaccttaagtgatctgcccacctcggcctctcaaagtgctgggattacaggtgtgagccaccatgcccagcctctattactacctgtaaaataaatcctaattcaaaagtcgccatgtgtatgtacataggaaatagtgcatttgaactggcatttacctactggcataacaaattgctctttggaatagatgcctagtcccaagttaagaagaaaaggggactcctgtgtcccatccatagtttctcattaagtccaagagccaattgtgctaaagtaaatgaatatcttcaagctaacctataaggggtggtgggaatattagttgctagaccaacacttaatcaagaatctctcacactgtctaagggtgaatagaacaactagacttgtagaggattgcttaatctttttatgaaaaagtcatgtgccaattaagattctagccatacctccttcagggttttcttgacttactcaagctttagacaatgaagtggctcaataatcttttctgtaatccctatgtctaatgtattaagtattccttaattcaatttggtagattaccctaatcgattttgttttctggtatttaaacctttagaatttaattatattatactgaataggatacaaagtaggacttgagcttaaaagatggcctttcatttcacagaaaagaaatttatatgtcaagtattttgctgtggtattctcattgacatagctgagatgataatgtaaccagttcacgacgtcaggattgctatgagagaaccccgttactgggtgcttgatttgctcttttggtttatccaaagatactgagtttgctctgactgcctcggttttctccattttaacaaaggcaaaaaccaacactttgtattaaataacctaaaccttggcattgaacttgtcaaaagagaaaatgacctgaacattagagccaagaagatactctgttgtattttactttgttacttaggtatctttatttattctttacttatatatttcaaaaagacatagccttcctttatggaaaaattcatttgttattatttaagtacaacagatagatagatgctccaaaattaagtctgagtgttttctttgcctgcagaactgacagtttgcttggcttatgctgataatccccaaaaaagtcgcttgtgtcttgaacatccataggaaataaaactgtagttccgggcagtgtcgataagaaagcaaactttacaccttcacttaggggttgagaaagagaatgagctattgattccactctgaactttagatggccatatcacatctgaaaccagtcatttcgtggtgggcagtattaaacccgactttgtcttatgactttacaaattagcgaattatgttgttatgataagagaacccaacaaaagtatctgagtttggaacatcaattttcaggatgttatatatttgagaacacttctccactgctcctctaactcctctagcctacctaactttaatagccaggcctccttcctacctgtttccttcccccttcacaagaagcacctattaaggaatcaagaaaaaaaaaaggatgacacttactttcggaataaagtaatatagtctctactatttctgctttcacacagatttgccctcctttctggcacaattacacatacacacacacacacatgcagatatacttacgtatgcacacatgcaggtatgcttagaatttagcattaggctgggtgcattggctcacacctgtaaccccagcactttgggaggccgaggtgggaggattgcttgagccccaggagtttgagaccagcctgggcaacatagcaagaccctgtatttacaaaaaaataaaataattaaccaggtttggtggcacatgcccgtggcccaactacttgggaggctgaggcaggaggatcactggagcccaggaattcaagactgcagtgagctatgattgtgccactgcactacagcttgagtgacaaagtaagacctgtctcaaaaaaaaaaaaaaaggaacttggcatttgcaatcctgaacctactttaacccaaggtaatatggtttggctctgtgtttccacccatatttcatcttttagcttccataattcccatgtgttataggagggacccagtgggagatgattgaatcatggggacaggtctttccagcactgttctcatgatagtgaatggctgtcagaagatctgatggttttaaaaatgggagtttctctccagaagctctctttttgcctgctgctatccatataagatgtgactttctccccttgccttccaccatgattgtgaagcctccccagccatatggaactctaagtccaataaacctctttcttttgtaaattgcccagtcttgggtatgtctttatcagccatatgaaaatggactaacacacaaggtaaccacaactcagggcttaaaacttctggacaccagtgtagttggaagatatagagaggaagctgaagagaaatgagaggcagccttggaactcgttcctctcagataagggggaactgctatagttgtactcatgggtatgactacagcaaaaggatacaaagcaaagtcagcaaaaggaaacgtgcatgagatgaagtccagaggaaaccaaacacaagcttccaagagactcccactggagtccacagaacacacttaattcccccagctattagttgtggcatcatgtgtgaaatgctgtctacaacagaggctcactagagactcagcacccaaggttttattgggtactggtcacaaaggcagcccctaccaggcatgcacccaaaacccagactcccagaagaaaggcagttgtttagcacaaaccacattgtttgtaccaacagttcagcatagtggggcattcttattaatcagttaaccctcctgaaatctaacttggtgggccagccatgggaagcacttctccagcacaaggatgctgcctctctccttcccctgctccccaaacccttctccacactcttttccctctcccttccatagaagtattaagaagatgtgggaacatccagatcttcaacctcacaccaccctgcatcacactcctgacaccatcatactccacttccacctggctttgtcctgcctcttctaattcttttgttgtttttttttttttgagatggaatcttgctctgtcacccaggctgcagtgcagtggtgcaacctcagctcactgcaagctcctgccattctcctgcctcagcatcccaggtagctgggactacaggcgcccgccaccatgcccagctaattttttgtatttttagtagagatagggtttcaccatgttagccaggatggtcacaatctcctgacctcgtgatctgcccacctcggcctcccaaagtgctgggattacaggcatgagccactgtgcccggcctccctgtccgaattcttagagaaggaaaagaaaaaagactgtgctcttttcccttgagctgatcctttgtatctcatggcctgcagtttctgctgcatccattccccgggcagcaccagctacataatttgcaaagtccagtgaaaatgcaaatgcaggaccatttgtattgtgaattttaaaagagagacaataaaccaggtgccaggcccttctgaggctgtgagggtcacacacctatgtttctacgtgctagcgaaagcacaaggtcaaccctagattctgaatatcactggggcatggcagaccttgcagatgtggatctgcaagcttggtttctctaatagctttgaaccacaagaaacatttatgtgatgaaaaccaaactatatatggcaaaaatatttaacacaggggcttcttatatgtactggcaaaccatatcatattattgagttttccctaaacttgattacagaaattacctggggttcttatcaacatgcagattcccacacagctcccctagagattttgatttggattctccagagtggagcccagtaacctgtttttaagaagttttctagaatatttttctgacagggaaagtgtagaaacttaggctcagaatatttgggggcagacaggcctatgctgaaattctccatttatcagcagtgtgacattgggaaagttatttaatttcactaagcttcaatttcctcatctgtaaaatagaaataattgtgctagtacaaaaggttgctatgggaataaaatgagacaaatgtctgtaaagaacttagaacagtgactgctacagtaagctgtcagtaatcgtagttataaatattacagaaaaagagtagaactcatttaaaaccctcagttttgtaatactagatgaattaagcttaaatgcaaattgctaaaggcaacagttatttctgtcaaattaaactcattcagaaataataaattacaatctgaagtgaacaaaaggctcaatcagtcatcaatggtaaacattttgagcactgctatggtctgtttttgtctttccaaaatttatatgttgaaacctaatcacccacatgacaatatcaggaggtggggctctgggaggcaattaggtcatgaggccactcccattaatgggattagtacccttgtaaaagagaccccagagagcttattggccctttctgccatgagagacttcagctggaaggcacgatccataagccaaaaagtagaccttcatcagatatcaaatctgccttaatcttggacttcccagcctccaggactgtaagaaataaatttctgtttttcataagctacccagtttacgatattttgttataggtagcccagacacactaagacaagcaccttgtgttggcagtgtcacgatgcctccgttcttgtcttcttagtttaaaagaatttaaacagctgggtgtggtggctcaggcctgtaatcccagcactttgggaggccgaggcgggtggatgacctgaggttgggagttcaagaccagcctgaccaacatggagaaaccccgtctctatttaaaaaaaatactgaattagctgggcgtggtggcacatgcctgtaatcccagctgcttgggaggctgaggcaggagaatcgcttgaaccgggaggcggaggttgtggtgagccgagatcacgccattgcactccagcctgggcaacaagagcaaaactctgtctcaaaaaaaaaaaaaaaaatttaaacaagagacgcacagtgaagcgggtgcagcataatttattgcaaaagaaaaagaatactttgaaagttaagtgcagaatagacaggatgctctgagagagagaggagtcagggtgggctgccggggaggatgagacagaaaagattggcgggagggagactccccttatgggagtcttacctgattattcctaaggaggtgaaaagaggtgttaccagtaagcatgttctgggtggttctctgggtgcacatgcgcagtagccgcacatgcgtgttcatacgtctcatgtctcattaacatcttaaatctccacctaggggtgtattttataccattataatgaacaaagggtcagtctgaggacggatgaaatcaaagtgcgcatactctctacagggggagtccctaatgaagatagctttgcttgaacgagctcaattaccaagcgaatgctggggcttattgtattgactgtgtggtcaccacggttgctgcgtcctaagaacatggtcatttcttttttcttttttttttttttttttttttttttgagacggagtctcaccctgctgcccaggctggagtgcagtggcacaaactccgctccctgcaacctctgcctcccgggttcaagtgattctcctgcctcagcctctcgagtagctgggattacaggcgcccgccaccacgtctggctaattttttgtatttttagtagagacggggtttcaccgtgttggccaggctggtctcgatctcctgacctggtgatccgcccaccttggcctcccaaagtgctgggattacaggcgagagccacggcgcccggcccatggtcacttttttgactacctatcctgcctcattgatagcaggctgcagatacagaggcgtgaccgatgatttttgcaatcaaggaattgatcatctatttcaggataagttagagaggtgagaagatgcatctctttaaaaggaaacacataaaggttaaagggcaaagcaaagagaatgagtaaagaccattttccgtggggattggtggagtgggtagaaggcttgagctggagaatattagacaatgattagccaaacgtaaagaagcaaaagtttcctgtagaaaaatatgcaaacatacacagtaagcattcagtaaatacttgaatgagaaaatgagacctgagttggaaccagaaaaaccgacaaatgccaataatcccagagctgaagatagtctgtagacagtggggagtttgttagccagaaataggaggggtgagtgggaaatctttaattaaaataaaacctttaatctttaattaaaatattaaactcttcacttgtgcttagttgcagagatctatgcctatgtagttttttaaacaaataaaacaaacattgccaataaaatgatgtaattcaataaagggcttacagtaggttccacatccaacaacgctatactgaaaatacacaattaaaacttattgttatattctcattatagaagtctttttttttgagacagagtgttactctgtcacccaggttggagtgcagtggtgcagtctttgctcactgcagcctctgcctcccgggttccagtgattctcctgcctcagcctcctgagtagctggaattacaggcacgcaccaccacacacagctaattgttgtatttttagtagagacggggtttcaccatgttggccagatggtctcctgacctcaggtgatccgcccacctcggcctcccaaagtgctaggattacaggcatgagccaccatgcccggccagtagaaatcttttttaagaagacttttaaaagctactcattttagacaagcctttcttaattgtgtaagaatgcttggaaaaaagtagtattttactatttttaataaatctgtaaaattattgatgactgctagcttttctgttttgcttcatttataagtgaatgaacagtgattgttgtgggttgaataacattccccaaaagagatgttgaagtcgtatcccctcatgcctgtgaatatgatcttgtaggaaatagggtctttatagatataatcaagtcaagatgaggccatactgaattggggtgggccctaaccctatatgaccggtgccttataagaagagaaagcgcacacacacacactctcacacacggggagaacactatgaaaaaatggaggtagaagttgcaattttgcagttgccctgccttaagccaaggaacatgaaggattgccggctactgccagagcctgggagagaggcacgggtgaacattctccctcagaatctgcagaagaaatgagccctgccaacttggactgtggatttctacccccagtactgtgggagaataaatttctgttgatttgagccacccagtttttggtactttgttaaagtagcctgaggagcctaatacagtgacttcctaatcaaagaatgtggaggcgcaattcaagtggtcttttcaactccaagaggattgggctgtgtttgttatggttaaaggaccattagcagttgttgaaaggataaagggaaggtacttcagtctgatgcggagtcagtgaggacacccaccgctcccctgcagagcagtgtcttgagagagaaagggttctcctctctgtaggagaagcaagctccattcctggtgctcctctgtatgatgggcatggctacctatgcctgccctccagaggggaagaagcctttgtgtttaggaccccgggatgatgttgacagctatgatcacataataataattgtatgataatgattgcagataacatctgttgcgtatctaccatgtgtcagatctagttaagcacttcacaaatcaactcatttaatcctcgcaagtatatagtccatgaaggtcatattattacccttattttacagacgtgaaaaccatgatagagattcagtaatttgctccaagtgacacagtgaatgacagagctggaatctaacccaggcaaattggctccaaagcccatactttcagcctttacagtttagcaaggctgcaccagaccccaacaaaaactagttcttttgtataacaagagaaagattccctggctgaattctagcagactagattcctcagtgccattacgggctgaggacttacaaacatgaggaaaagataatggctagtttggttttctaggtctgccttagcaaattaccacaaacttggtggcttaaactagagcgacttctctcaacagttctggagccagaagttcaaagtcaagcatcagcagggccacatccctctgaaggatctgggggaggatccccttcttgacttttccagattctgggggctcacggcagcccttggcttatggcagcaaaactcccaactctgcctgtctccacaaggatttcattgtgtgttcaagtgtcctttctgtctcatgtcaggaaagtctcattggatttaggacccacgctaatttagtgtgatctcaagtgatccttagcttaattacatctgcaaatacccagtttccaaattaggtcacactctgaggttctgggtggacatgaatttgggaatggggaatgatattcaacctgctacaatggccaagaaacatctacctagttcaaaagagaacaggatctactggaaagcttctcagctcttggagccccacaactgtgtctcctgggtcctagccttcagcctggctctcagcacagctctttgcggataacatggctctacactgcgtcgaacagatttggtggcagtgactcacctagcagagttctcagcagcccacctggaaggtcccatcacattgttgttattgcagatagcactttcactgttactcaattttttttctagtatcttgtgaacaatgtgtttcaaagtataggacgacttggtggttaatgtcacaaaagcaatcattggagttgtcaatcacagaatgacattacataaaagaattaggactcttcttgctcaagatgctttatacatgagcataaattgagagttatgtatatttggatagtagaaaagctatacattaatgtgcatcttaatgaggatgattttcttcttttgataaccaatgtgtctatgaagccatctagctaggtactggtgagaaaaatgtttcaaataaagtatttttattggagcatataaaagagttacaaaaatatttctgtaaaattttctggtctatttttttcaggttggtactttttaatggtttagctgttaaataagcttcatctattaacttgtattcagaaataagcttaattattcatcaattcatgctcaccttatattttatggttttccaaatggatgatatcttctatgtctgtacattttttattaaacataagtcattttatgcccataaagcttattcctgaaaaaattattttgctactaaaaaagatcattaagttcacaaattttctctccatggcttgatgctgctatctttctgcaccataattagttgcatgtatagttaattattatgagaaaagcagaacatctcccaatttctacaagatacttagagtttgatggtttaactatgttttctccttcatttctcccatccaccctccagccacgtgtattttcatggtaggaagatgataagcatacgctttttcaaaatgacagcaaaatgttcatcaggaacttcataaagctttgatagactgaatatatatttagaaccagcatttcaatggctctttaccttttcttaagaatttccttatctatgaccctcattgctagaaaaaaaatgcgcacttttatataaacacaacatttttcatataattttaaagagatttgaaaccctctgaaggctatatgtagtccccatgccaagaatgccagatttgggaaccaacatttcttatccatttataatgctaattaattatttctcttaaaaaatactctagttagcctgtaaaattcatttagatgacacatttaattttgcccaaaaccttgatttttttggaggaaaaaataatgtaagaaaatacattattttaggttaggatctttaaattctcacagtcaaccaccatggtttctttgtacgacctaagctcattcactggtgggcaagtgttttggggaccaggagtggatctgattcatctctgtatctgccacagagcctagcatgatggtttagacatggagggagctcaagtaatactgttaccggtacacttgttatttaattttaaaaattaggaatggctactgtgtaagtacataaacatttaagttcataaatttgtttacagttgaacacaaaaaggccatttgtgttcagatatgtgacctggggaagaaagatgaaatgggtattttgatcagcacggggagcagtcagtgggcctacagagaaggcgattagaaaagccttgtgctgacagtgcaggttctatgatatggaaagaactagtgaggaagatgcacatgcttagtagctcctaggaagagttctcaaggagcatcaacctctatgtgtccttcccaaggaagcagtgggccctagattggaggaattcaggataaaacacacagtcctgctaaccatttcttatcccagtcacctgaagggatgagatcagaattactagggaaagactttgcagtgggatagatatgcttccaaggtacttctcccagcccctaatacttcctgtttgctaatgcttaaaatctctctaacctaaaatctccctaacctaacctttcattttaacattagaggaaaaaaaatttgctaaatattgactgaaatttattcaccctaaatttaatcacaaaagtacaagagcaagcatacttcctctctgattccgtgaatgagaagtattgaggagccaaggttggagaaggggttaccattgagaatcggagagggcaccagaggtcaagactggggaaaaagacaaattgaaaagacattctatctttccctaggattgttccaattatcaatcctattagataagcatatgtagaaacctggtataaaagaaattattttgtatggctaaccactctccttcaaaaaacttcacaatttgttaagtttagataaagatttatcctcttgtttgattagtttccttagaaataaatttcattcttaggggtttcactaattaagataaatagacaattagcctcttggcagcagaagctacttcttatttatctctgtattcccaatgcctaggccagtgcctagcataaatattgtgcttaatcaggattataatatgtatatttcttgaatgaagataacaaaaatatctattacaactctaagtgatttattaattgatttgagaaaggatttatgttaacttacaaaagttcattcaataagaggttacatcaaatatttaaatcattgcaagaggaaattagaagtaaagccaatgaaatgaagttatatagctaataaatcaatttttcttagttgtaataagtatacaaaatctttctgcatgtaatgtgtatgctatcagcttaatataggcatgttttaaaccatgataaagaaaatattccaatatctcaaattctttcagaattatgccaaccctagaacacagtttctagtatgtgattaagccttctattttttaaaaaagtatttctcaattgactgctttacataaatcatataggtgtaaatttgaattattactacataaatttttcttagatttatgacagaattaaaatagccttttaagtcttaaaaatattaataagaaaagctcaattatgtgaacacagctaataatacattcattctggcaggcattgtgcaaagttttcaatgaatatgaatatctttatgaaatatgagaagctttgttcatttacatacaagttccttagtctcctacattaattattttttctcattttttcatgtggaaccttttccagtaagttctcataagacaacaaatgacccagtggagtacctatttaaaacattataaacaaagaaagcttctttcttcagccctgttctttaatatgtaatgaaaatgcttcatctttcattacagaaatgttttatgttctaacctcttaacctcattattatagtttggttagatttttaaatagaactcgagtttttctcagtgtttcagacaggaagaaaggtggagtacctgacaacctgttccaggaaagaatgttcaataatcaagcatctatctcctcttcctgagttaatccagttagcttatgaggcaagcatgggggagttgcaaagtaaatcaaggtgctgaattctactctcatcctgatcctaaatggattgagttttgttctttcttatgtactatccccatattcacagttacagactttgcaggtcacttgctgtctttgtcatattgggatgctctaacataccatagactgggtggcttataaacaactgaaatttgtatctcccaggtctggagaccagaagcctgagcccaggctggcaacaaggtcaggctctggtgagggcactcgtctcggtagcagtctgccaacttctccttatatcctcccaagtgggaagaaccagagagctcgttagggcccctttttataagggcattaatcccactcatgagggctccatcctaaagacctaataatccccaaaggccccccttctcatgccattacattggtgattagggttttagcataggaatttgtgggggacacagacattcagttcatagcagtggaagataaggggtgctgtgcagacatcatgggctctatgtgtcacataatgtagcatctcatacagggtaaacaatcgccactgttatctcttcccaaagccctgctgtggggtctgctcaccggccctgcatccagtcaaggaaggggaggtggagaagggcacttgaatgctgagtggcaccaagaggaatgtgcagatgtcataaactggaaaattggggctaaaggtgaaacagcatcatacaaatgtcttccctccaaaagctcaatcttattttagaaatatatgatccatgaggactttatcataaattggcccaaaacagccagtcagctactgagggtcctcattttccaatgagtgcatgttttgctgcttcagtggtccagcacgatttggaagtattattgctttgttactgaagagacctttgttttgattcagttgccaatattctctaagatggtttaatgtgagccatggtacttaggtgtaatcctgtaaggtttcttttcctgggattcacagtccctgctttcaatagagtctcacgagggtctatgacccttccagacagcactgatttcaagtctgtatcactttataaaatcctacacatagtcgtgatcttagaaaaaaaatggacacaatatagaacacaaaaagatgaacccattactaacaaatctccatatatccattgtatctaagtcatactctatgagcccaaaggctaataaaaaaacaggatcagacccaggtacaggggcaacagtgccaacttctgaaagcagggatattggtgtagcgaaatagagaatatgaaagaaaaaacaatactctgtgagaaatagcctagtagcctatactttatgccaataagctttataggaagttctttttttttttttttttttttgaaacagagtcttgctctgttgccctggatggagtacagtggtacaatctctgctcactgcaacctctgcctcccaggttcaagtgattctcctgcctcagcctcctgagtagttgggattacaagcatgcgccaccacgcctggctatttttgtatttttagtggagacaggatttcaccatgttggccaggctggtctcaaactcctgacctcaagtgatctgcctgcctcggccttccaaagtgctgggattacaggcataagccaccgtgcccggccataatagtaacttttatatcccagacaaaaaaaaaaaaaaaactgagttaggcttacagacttgactctgaggggctcatgataataattttcttttttttttctttagttcgtttgttttagcatgtgctcagaggaaaaagaaaaagaatttatggaagaaatctctaaatcatattccgttctttcatgaaagtgggcaattcaaataatttcactcaattttcaagtgagatattcacagtaatttgtatcttcaggttgaggctaagcttcattgcacttcatgggaatatatagaacattctagcaaatctttcttagactattacatctttgacttacatgtttatgaagaatcatctgtgcctctgattggccttatataaatacaagggtcatttcagagagcagttcttaactgacttggaaaagcctaagagccaaacaattcagcagctcttccacattgatggcaccagccacatgcagtacatgtgctttacgcatttcattattgcatctctttgtcttatgagtttattgatggaaaattgtgccttgtcttttatcaagtaaacatatttcagaagacatctacatgctatcaacaaaacagagcaaattcagaaaatgtaggacttcgttgtacttgggggattacttcaattgccttaatagtctaccagagtagaaatattacattctttaaagttcagataaataatttgtgctgcttatgtaggaagtaagctattctccactgtaagcagtcttttatgttgacaatatagaaataatctgtcttataagctacactgcatctaaagccctgacactacagatttatgcatacttctggctgaaaataatattgaaatgtgaaaatgaaatctttcaccaaatctctgggaacataggtttgaggctggctttggaatcactaaaaattcattgattcccaaacgtagactaagtaccataagaactgactagggtacttgattgagcttgtgctgtatggtttattacactggtggtaggaatgtgtcaatagtgattatactgctctaagtattttgttttagggtatgattctagcttcccttgtatcattactcaaaactccaaatgaagtgtgtaagagtatttttcaaccctggatttacttgcattccatactcattaaatatatgacacaataaaatgtctaggtcttatgcaaggaacttcaactcttctatggctcctggcctaaaaaggtatctgtgagaggcagaataatgtccgccaccaaagatgtccacatcctaatcttcagaacctgtgaatatgcgaccttacatggcaaaggggatttagcacttatgactaaattaaggatctataaatgcggagattttcctgcaattcgctgggtaggtagaatctaatcacatggatccttaaaaatagtaggaggaggccgggcacagtggctcatgcctgtagtctcagcactttgggaggccgaggtgggtagatcacgaggtcaggagttcaagaccagcctggccaaaatgatgaaaccctatgtctactaaaaatacaaaaaaaaaaaaaaattagctgggcatggtggcggttgcctgtaatcccagctactcgggaagctgaggcaggagaattgcttgaacctgggaggcagaggttgcagtgagtggagatcacgccactacactccagcctgggtgacagagcaagactccatctcaaacaaacaaacaaacaagcaaaaaacatttgaagcattgagattaaagtgttttctttgattaaaaatctgtcaagagtaattagaacctgcttcctttcctcttctcattgtacagcttacaatatggatcaagaaattgtttctattgacatacttctttccatgtttagatcggcttccaagatcttatcctttccactttcaatgtcatgaaaaatcattgagagttcctttaatgcgaaatgttatgccagtgtcacttcctgtgagacagcttcatcctttttggggtcacaaccaccttccttatttgtgtagttcaattcatttaacctgagttcctctggctacaaatctggagtctctgaaacaatgacacattcagctattgcttctataactccatttacattcatttcacatttcactttcagcatcatcactctctgtttcttgatgcacttttatcttagttagccaattctcccttctcgtgtccagttttgtaaagtgttatatgggcttatcactgggaaacaaggaggcaacataaccacatgctttgctgtgtgtggaaagaataacattatgtggagtaacaaacccttaatagattttgaaagaagtgacatggttggtcactgatcatgatgcacatctgttatttctgtatagatacttctgaatgcacaatgaggttatgtcccaataaatccatagaaaacacatagttgaaaatatatcaaaagttgaaaattcgtttaatacacctaacctaccaaacatgatagcttaacctagcctaccttaaacatgctaagaacacttacagtagcctagagttggaccaaatcacctaacacaaagcctattttgtaataaaatattgaatatctcatgtgatttatagaatactgcactgaaagtgaaaaacaaaatggttgtacaggtactcaaagtacagcgtctactgaatgcatatggcttttgcaccttcctaaagtacaacaattttaaggcaaactgtcataagtcagggttcatctgtagtgtttttggacaggagagctagtaacaaaacttgaacactatacatatgcataattaaatttgtatattatgcaattactcaaacttagtatagcacagtaactaaaatttgaaccatgttgggagactggtatatttacctatactatagtaactgaaatttatgcatattaaagtgtgtgcaaagcaaggactgcctctttgtgtgtgtatgtgtatgtgtgtgctctgtatgttttgcatattttcaaactttaaataaatgccatcatataatatttatccttttatgaacttgctatttacattcaaacaatgtttctgattattcttattaatgtatgcagtcaccgtttatttctttttctgttttatgatattccattcacatgactatactacacttcaagttatttatgtattctttattgaaaatatatattgctttcagttttttatttttgcaaatatgactcctctgagaattaatttattgcttccatgtagtcatgtgcaagaatttctctaaggtaactatatctaggtgtggagttattcagttttaaaccttattagatatttccaaattgttttcccaatttacactttcaagtaagttttaattttattttgactcaacttgctccataacagttagtattggcaaattccattttaccaatctgatcacataaatgaatgaggctaaactaatttaatttgggttttcttgattaagggtgagactgagcatattttcaagtttcctcaaatatgagttatctgtatcttttgataattatattaatatatattatttacataaaccaaatattaatgtttataatttgtatatactgcagctgtcatctcctaatctttgtcttgtctttttatttgaattatgatatattttgatgtgcagaagttttaatttgaatatagtagaattcatccattttcctttttggtttatgttttgtgtcttatgtcataaaaatattatcttttgtgcttcatgccttttttcttttatgatgtcttttttcttttaaaagttttaaccgttttctatgtttgggtcattaaaatacatggaactcaatttttttaatggtataatctaagggttcagtttcttatttttgacacatatacaaccaaattttccatcatcaaacatgggaaaaattctttctccactgaactgtaaagccacctctgtcatacatcaaggtttttttttttttattagactttattttttagagtcaatttaggttcacagcaaaactgaatagaaagtacagagatttcacattcaccctctgcccccacatatgcacagtctcccctactgtcaacatccatcaagtttttatacatgcaagggtctcttttgggctctatatttttttcctttgttcacattgtcaatgctgcacaaatttcatactgtgctagtgatacatcttcataatagaacttggtttctgatagagtttagtctacagtgttgatttttaataaagttcttaaaatttctaactaaaattcatgcaaattttgctactgcaaatagtatcttttaataaattactttttctaatgattgctgatagatagaaatgtaattttttgataatgtgagacagaattcacattacatataattcatccatttacaatgtaaaagtcaatagcttctgttttttgaaattatatgtatatatataatcatatagtgtgaattctttgtgtctgacctctttcagtcaacgttatgtttctgatattcaagtttttgtgtgtagttatgtccatttatttttatcactgtagagtatcccatcatataaatatatcagtatttgtgtatcctgttttcagtttgggctattgctgattatacatcattattctagaatttccttttggtacattttaaacctgcccactctctagagagtattttattattttctcacggttttcatttcttttggtctgtcttacaagtgtcttaagtatatttgttttgtatcttttttataattattacattaccttgagggtttagagggtttttctggcactttttcacagtggcttatttcctcatctgttttggtatttttgttatctttctgcttatcccttgcaccttgcaatgtgtgagactcattttgtcttaggttgatgttgctctgtctcaacaggatttggatttgcttatacacgtgctttgatacataatctaggttgggtttatgttcatttattggcttggcttttcttggactctcaagtagtgtatactcaaactgtagacctctgtgagggcaggcctgtggttatgaactctcaggagaatagctcttccttattcagtattctggccaagacagatgacagacatttcctatggccagtagtcagctgtgtttcctagaacatcctatcattgaagatgtagccttcaggggcctcagccctgtgcatcctctagattcccaccacaggggagcccagggcactttcctgtccctggaatgctgtgcaattcaatcctctcgctttccaagataaaggaatgtccccagttaagggccagctcaccactctgatgttcttccccatttttttggtttttgcctttttgtttatttctttgtttaagaggggatgttgctttgttgcccaggctggcctcaaactcctggcctcaagtgatcttcccccctcagtctcccaaagtgtcgggattacactggcatgagccatcatacccaacccttccccttctttttctaccattgggatttatcttgctctttcgagtccccagctataccttaaaaaagacacttgttaatttttatgcagcatttgtgggaattattttagagattttcagaacccctagtctgtcataataccaggatagaaagtagaatggtgctggccagggcctggggagatggagaaatggaacattgctgtccaaccactgtgaaatttcagttatgcaacaggcataagttctagggatctgctgatccaccttgtgcctgtaggtaacaatactgtatggtgctcttcaaaatttgttaagagggtagatctcatgttaagtgtttttaccacaataaaaaaattgttttttaagagttgaagactattttctgaataaaaacaaaatgaaacctcataagtaaattcagagttgcctagtaaaatgtgtcacacgcataataaaagtgtaaaacattcacactcctcactctcatttaattatcaagaattaattaagcttttatttttcttccataaattccaagttcccgatagctaacttccaaagctaaaagtaatgttacttttgactcttttgctacaacaaataatactacactaataccctggcatgtattgtgtggctatgtagagtatatctgtaggaaatgttggtggaggtggagctgctggttaagggtgagagaaattttaattttctagctttcaaattataccattcagcctcccttttgtaaactgttagtttaaatttgcttttctgtaattgtacgtgagtgacaattattaaccccagttaaatgaacaaggagttgatcatctgggggtgttcacagtgctgaaattatgaggaaaagatgtggttcaggagaagcttattaaatgtactttcctttttctccacccccacaccaacatgctgacaatagaaactcattctcaaactgaccttattcaaggtaagaaggtattgttccagtgtgttggtttcaaggactttcttccatgcagaataaatagtagaactaaaatatcactaaacctctaagtaagcagattatgtgctgtcaacggtgaatgcccaatatatccacagcgcaagaacttaagtagacagaggtattaactgtcattttatttgaaggaagccaaaaaatcttgtgctcacatcatattccttaaaacctcattcttccagaatggctaccacagtcccaggcatcacctggagacagagacataatacccagcagaagaaaagagtttattattttatgatctctctgtttgaagaagaaaaaatacaacactttcttaaaaatttctaagtggacttcctcttgtgtattattggccaaaattgaattactgaatcatatgccaaccccaggaaaatcaattattggtgtgaggaatagaattcccctgatcaccttagcctaatcaatttgtatccatgacttacacaccctgcaacaaaggaaaatgtaggacttgctattgattacgtacacaagtgtgcctgatgtggacagcaaataagtttgatggtattgtttgtcataaagttaagtaacagcatgagtaatatggccctctgtggaatttcttggtggcagttgagcaaaatttaaattgctctgaaatggaggactgtgatcacggaaacaaggtagagttagctgatataatttggtacaaggaaattaaccatggttgggtttttgagccatagatatgataatactcagaaatatatgtaataatgcagcattcccaaatgattccaatgttgagttctccacacaaatcatttcattttctttcagttggtgttaaagatattggagtcctcatttggaagtcactcactatagcatttatgggaaaccgagctctgaattacaaacatcgagttgacaaacgaaaatctggaacagaacccactcaccagctggcgaccacccagtattatttgactttaaacttgatacttgaacatgattttttaaaagaaacttaagcaagtaaacataaaaaaaaaaaaaaaaaccacctctctttgacttggtcttgcaatgggctttttaccgctttgaaatggaatacagttttatttccaataaacagcagccgtaacaaaacttcacacagacacctggagaaggggcatttgatgaatgcaatactatcattgtttattatagaattatttactagaatctggcagagatcctaaacaccatttaccataactttggccaattttcctaaatccatacttcaaactctactgatataatgggctgctttagccaagaatgatagctctgttactccccaaatattaccaaaacaaaggcgtggtcacttcccacaaatccacctggagtatgagtcaccagctgccccttgttgatataaagagctcgaagaatgaacagttttgaaatccattagtgaatcactgagaatccactcagtacagcttggagatctcaacagaagccaataataattaaagaaagaaaagctctgggttaaaggaaagcaagcaatccagcggaaccaactagaaaacatcagccaactgcagcgccttgctggaattagggcagaccacagtctagtgcctgctagagcaattgaaggaagcccagctgagagagaaggcttcagtaaagaaaattagggaaggttttatttttatgtgaagttcttgtgagaaggatgttaagagaaagcattatctgttattatttatgattgttgagccccacaagcaagcctttgagtttttataagcccacatagcatgtttttttgtttttgtttttcctgagggtaaacacttttatttgtaacagcattgtccatggctgtcaatgtatctgatggaaaatacctgtccataagcatgaaggaaatccatgatcttcccctttaatttgcagaacattacatagtatttttttaaaaaagatgcaaatagcagcctacttctttgctgctaaagagctttaatggaatttttagtgaatcagatgtgtaagggctgatgtcctccaagctgagctggatctccccagttcttcctaaggttccttttgtgtcacattcaactcaacagacaggaagcaactctcctgcagtgaaggccgcacagtgggctctgctcctaaatccaaggacacagaggagcgcctgtgtccccaaatcaggaaggcgggcatcggcgagacccagtgtcacagagaacgagcatttttgctgctactgttctgtgcaagtgatcacagcccagatgtacagtatgatttggaacctccacactatttagcatcccttaatttgtatccagtgtgctaactgacctggaaacattagaaccccatttccaagtttctcttaaaaatccccaggtcccaacacacaccaaccactttcatcctcaacagggcatgttacgccagagacagatccttctgcatgcattttgccttaatgccagtaagaaaattgattttttgtttcaggatttttcaatccagaagacaaagagattagtcagcagcttttaaaatgaaagtttccaggtgagagatttcaacactattttgtagatctggtgaattaagatacatattttcagtattttaggaattcaaattctaatcctttccaattcaccaactccctttatccaaatccatggaatcagagtctaatgaaaggggtacttagcatttgattccaagctttcccttacaactacatttacaagaaagtattttgaagctgagaaaactgacaggtcctgtggttgatctgcacagttctatttcctttgggctccaaatgttaaagcacatgccctggcaattcgggcaccagttttgaatgaagacacccagcatcttgcacctgcctgccaatctccacgtcctttgtagaggaccggggtggacatgcccatcccctcctggggaagtctgtttacactgcaaactcctgacttctgcatggcggtagagctgattgtgatacctctgtccacctatgccagcccaggtgcctgacttgtgttgggttaactattctgatagctttgatatggccttcccacatgtgccttctcctactgtggccgctgtcactctgtctccactcccatgacacttggatgctccagtgacaccagctcctgcacagtaccactcttcagcagcgttcatatcaaactgtgcatgtctagcttatctgggggaagacactgaagagaggcagaggtggagacgtgaaagaagacagcaaaatcacagagcttcgcaagagaaactgcttgcttaaagataatttcttcttctgattacaaaagttacacatgctcattgtcaaaatgctggaaaatacagagaagtttaaagaaggaagaagttaccataatcatactacccagctaacatttcggtgtattggtagtagggaaatttctggttgtcaaggaggaaggtatatatccctaatcacagaggttttttcatgctcttaggtcctaagttatagcattttaatgggagatttctaagacggaaggtatttctggaatagcattccttccctttcttctgcagatctgtcaaattgttcagctttcttgactaatagatgctatggatagagcatccctctctctctaaaaatctcaaaaaaagcaagtcttatttattcaggatttgaagagaaatattcaggaaggatatttcatcaaacctgattcatatattatgcactgtaatgatgctagacacaaaacacaagatttcttgatagatggtcagaataaattacaccaactgcattagctcagcagcagtcctgcccggatctcagcacctgagcttctcatctgcgtatggttgctcagcttggtcactgagacatgcaaaagggaaatgggcattttccctgaacacctaaatcctttccaaaatctgtcaaaatgtttactaaaatgtagcttctttgtttatcagacgaactgtggtaacagcagttatgaaacttatcacagttcatctgataaactacattttagtaaacatttcaaagtgaagcagatatgagagagaacaaaattatttgtgtttacatgagacttggaattgttaaaatttttatatctagcatacaaaaaggctgcttatgttaaaaattgatagtaactaaatatataagaccaaaagaatactaataatgtgaattaaaatgaaatcttagcttggtttataaactatgaaatttgactaaaatctattctgtatatatgttctagttttagaatataaactagaactagaatctaagtagtagccaattggtaagtagtgtctgactgggatctaaaccagttcagattaaaccattgcaacactactcagaaaagcgtatggtcaagatcttccgctatggagattaacaagaaatgcccatctatgtaacagtaatttaaaaactgatagtggtatattacattccagtgaatgacgtaaataatagcctttttaaccctcttgcgaatatacatggtatttgagaaaaacgttgcttcagaacaggtgaaagaatatgcctggccaaaataagttcggctacccaaaatggtaatggcttaagccttttggtttttatctttgttaaaggcagcgagtgacattttaatcttcttgtgcaggtttttctaaaacacaaaacgctttctgttaaaactcgccacaaaggcagaaagggaaaagcattcacagatgcacacagattccaagaactctctcacactatctcaggaactcttactgctccctagaaactgtttttcatcagaatggggaaaataacacgactggtacctgcaatttctgacaccaatttcacatctaacctctgtaggtatttaacggactcagggcctaactgaaactgctgctaactattgatttgttgaggtgttcatcccaggtggtttatggggactctgtaaatatgggctgataatagtaatggtcaagctcccataatttcttaatttcagtttatttatttataatatttatggttgtaagatcgaatctggtgattatctgtgctgggggcagaaatttcatttctaaaggatggcggtaaatataagcatgttgttggttgaatgttcaaaaacatatttcaaaaaccaagtactaacagctaaggggaaaaactcacacaatgaaccagaagtgtatgaaacaaggaataaaatggaaaaggagaaggcatgaatgttggagggatttaagttatggatgaaactacagtgaacattcagggtatgttgggagatgaaaactgaagcatccttttactcggtagcaaaagtgaccgggatcaagggtcactcccggatacaggtatcccggagcacctccacaatggcttccagcccagacctttgtcgtgggaaggagtcccatgctctcatttttggcacaaacagagtttgactctcaccacaaaacagcatcaaacaatgtcacaggctgtgcttctcacaaggttttttgtttgttaagttcattttcctgaactcaaacattgtgggaagaagtaggtcataatatccatttccctctaaattgatccagagcttccagaaatctgaagaccagtgaagccaaggtttcttccaaacatagagttgtgtgaaatcactatgtaaaactgtcagcattattttggtggcaagttctgtccccatcttggctctcctccctgcctctcccacagcctggtacagtcagctatagagttcagccctgaatacctgctggatttacacctagcaatgcatctgttgatctcactgatgtgaaaatcattttacaaagaattcccactgcattttctttagcatggcattcacattcccccatagtgtggtcccaaatcactcctggtcttcatcttctaggttcctcagaggggacctcctagcatcagtctgggaattctctgtctcctatgggatccaggacctggaccacccagtgtccttccaacaggcctgaaaccttcctatgtgcaggtgtggaatgctgctttcgcttcttgcctcccaatatcttattgattcttcagttccttgttgtaatctccctcattcagagttgttttgtgtttgtgttttgttttgttttgttttttgagacagagtctagctctgtcacccaggctgtagtgcagttgtgatatcttggctcaatgcaaccaccccccaggtccaagagattcttgtgcctcgggctcctgagtagctggacttacaggtgcatgccaccatacctggctattttttatatttttagtagagacagtgtttcactatgttgcccatgctggtctcgaactcctggcctcaagtgatccgcctgccttgccctcccaaagtgctggggttacaggtgtgagccatcgtgcccattctcagggtattctttttttggggggaggggtgtgaggggagggtgaggagaatggagtttcactcttgtcactcaggctggagtgtaatggcgtgatctcagctcactgcaacctccacctcctggatgaacgattctcctccctcagcctcccaagtagctgggattacaggtgcctgccaccacgcccagctaatttctgtatttttagtagagacagggtttcaccatgttggtcagtctgtttttgaactcctgacctcaggagtggtccatcagccttggccttccaaagtgctgggattacagacatgagccaccacacctggccagagtattatttaattctctgagtaaccagaagccaaaggatattgcttcacctttagttgccatgtaattgaggcatacctcatcatcagcagtacacttggttttctatactggattacacaccttttggaggcaggggctacttttattcttctttaaatcttcacctgcactagcatgctaaaacaaggaaaagaaagttttatcttctatactggaaacaaagaaaaacaagggtaattcatcttacttttatcactagtctccgattaactacatgttcaagtttactgtatagtatatctatgtgatctaggcaggcatatttcccctcaaatatataatatggcaaaataaagtgcaagttgtgattggtgaagataaatgactgaacttttactatcatattctcactctgctgataaatcatctttgagaattcgtattaattttggtcaagaaatacacaagttaaatccattttattcttttttttaacattgggaggactaagtgaataaagaaggagtgaattatatgattgtctaccccacagtttcagtaaaacgatattttttcctgcaatatatttatgatctgccttaaaaccatagaatctggcttaagccaaagcaactgtatcttcctttattttttaacaataaacacctttaattatcttccttccgactactttgttgtaacacacaatgtgtttgtctcctgaggtgagcataaaaaaggagcccagcatgacttgaatgctaccgtaattaaagaaaagctaaaaaggtcaaaaacaagaatgtggtaaatcttaagcaactccccagaacaggcgccacctgccactttgtgctgacaccgtcaatcattgaatcggttactgaatactttcttgcatttcttcttctccaccttgtgcccacgttaagcaggaagacatcatattttcattagcacctgttttgttttttcaccttctgtagactgttgagtgaatttctaataataaagccaaaaggaaaaataatggcaatatgattggacaagcagtttcagaatcaaggtaggatgcctttttgttggtggaggttttttgtttttgttttgtttttggacttattctccctcatatcaaataaatttattaaacacacctgaacacttgttatgtgccactgtcggccacgtattagggacacggaagaacaataagacatactccctaccaaaagaggcttatggtttagaaggaagacacagtcttgtaaacaggtaagtaaaataaaatgtgagctgcactatgctggaagtcagcccagggtggcccaagtagaccatagccagtctacataaatagggagacacgggggacagctttctagatgtccctaacgctgaatcctaaaagatgagaagcatttctagggtgccagagtggagaaaacacctgacttgtgggagaacggaaggcctcgtgttcattcaatggatcaactatcattgggcatctccacctgcgagagacggcgctagcccctggggatccagtccccggtgagctggaaagctactctgtgctctcagaggacttggaacagagaatgcagacagggtggcaggaatgcaggaatgtgctcacagtgcaggaacccggtggctcgcagagaagggcaccaaacttagacctgggagatcaggaccctctcccccaaaacctggaggattgctccaaagctgtaccgagtcagtggcggaggccgggtgagcgtggggaagggcatcagacacggtatacctgctccacctttcccttttgttttgttgtcacaagaggcactacttcgctgcctccgtctcctctgtgggtggaaaggatggacccaaaggaacagaaggctgtggccactcgacgatggttttgatagggacttatcttgctctctctccctggacactctctttctaggcctgcagcctctctcctcccttcccatttccaaagcctctgccccaacctgatccaagtattatatgtaaacctgtcattagggttctttaaatcaaggctttttgatgacaaaaagagggtttaaaaaaaaaaatgtggctcacgcctgtaatcctagcactatgggaggctaggcaggcagattgcctgagctcaggagttcgagaccagcccgggaaacgcggtgaaactccgtctctactaaaaacacgaaaaattagccgagcgtggcggcaggcacctgtagtcccagctactcaggaggctgaggcaggagaattgcttgaacccgggaggcggaagttgcagtgagccgagatcgtgccactgccctccagcctgggtagcagagggagactccgtctcaaaaaaaaaaaaaaaagaaaagaaaagaaaaagaatctgtaagaatatccagtgtggcttctgcctctggaataagtaatagtcttagtgaccatggctatgggagtacccgggttccatcagtgtgccctgtgtggttttggtctgggctgcattggcgtggcctgtttttttgtttttgtttttgtttttcccttattactgttcgtggagtgttttagtttgcttttttgtttgtttggttggtttttttttggactctgcgaatggatgtctaatgctctcgtctccctggcaggacctccttcctgtgtctgcagtttctcttgtagccacaccgtctgcccgatcatcagtgctaggaaaataacgatgagaacagacctttcgaagcccgattatcagaaagagtgtcttcatgcttgaaatctgaatataaaacagacgcccctgaagtgcatccctgtgacactgcctgtacagcaccgttaaatatctcatcggcagtaatagcttaagactactgtgctcagtcacttctttgggtgtcactcatagcaatccccatccctgccatcatcattatcacacagcactgccataatgacaattataaagatgttagaaagctgagacaagtcattctgaattaaaccgcagctcccataggtcctctgaaattacccgtttccaatatctccattgtttccctacccaaaagcaaaaaggggagacaaatgtctcttgagcgatgcacaaaatacattataagcctgggaataatcaaagctaactgtgttcagtagagagagatgcactgtgactaagtttcactgaattttaatggcataatttttagcccagaaagcaagctcatgtgtgccggagtgattaatgatacagtttatgcagctcattggtcatacttaaattagtttaaatattcatctgttgttttgttataatgaatctccatgtttctttttatttctgttcccctgagtgtttcctcttgtctggttggaggatgtttgcctgaattgggaaagaaatgccaatagccctgtaggtgacaatgcacccaggctgctgaagatcaggggagatgaggcaataaacgcttcatttcacactgtgaaatgcacacacagctgcaccagcttcttgagtgagatgtcttggtggattctgtgaggtgccaggtcagagattaaacttactgatttgtggcacatgaagccattggatgaagttggatgctgtttgctgtccctgggacttcctttaaagtccacacatcaatttttataccaactccctgaaagtcctccttttatgagcattcataatttacattttgagttggaaagtcctgtaactctaccttctgggattttatgaattttcctcccaaatacaaaactctctagatgctgaaattgcatttgtggtgaagaagggaaaggccataagagtaacttaataagacttcatgttacagaactgaaagatctttcaaattcacataaaaggaggcctgcacttgacactgtcctgactatataacaacatctagaagtagacagtgttgcctttttatgctatatccttgggagtacaatttacaaatagtctactacacacttcttgcacttgtgaatcacccatatagatcaacctttaaagtgtaaaaaaaaaaaaaaaaaaaaaactttataacatcctgagaattaatccttggagagctggctagatacagaatgaaaaattccagacaccacaagtagttagagctcagcttcctggataaatcagttaatttggaaattgtggcctccatacccgctaggcatgtttgttcatccattgttctcctccctatctcctagccacagtgaaagaaaacgaagtgtggtgtacacacacttctagctatgaaagcagctgcatgatactggaaacacagtgtctccaaatgtttcagccttgggggcttccctcattattactatctgaataaagtgcttcagtccgctatgatactttactctaggaaacccagctttgttcctcacattatcaatgacttccaggagtgttcaggaaggacccaacttttacactcactattcaacatgttattaccatgctgctaatgtttagctttcttctacattatttgacccccaaaacagacactataacccaactaatataattctgttatagcatgttacaagtttttagcaaaggtgagaatcatcaaattgcatacgggatgttattattcttcatatccatcaaagtacaggaagtccttcacaggcagccatctttttctctgggccacaccagagaagccccctgccttctcctttctttgagtttcaaggactgaacttcatgtctcacaagcagtcagaggtggaagcaaatgaaattgcctttgcaaaaattctaacagtgagaggaatctcacctgactccatcttgcttctaacctcacaagctagctgactttgttagctttaaaacaaaaatgatacatcccttcctgaaactaacccctccttgcttagggactgaaaccatgtttgtaagtctaatgaaaggacataagattaggattatgggaggggcctgaattctgctaagatatatgcatagttaaacaataaccagctattgttccagaggtacaagatttgtaacttctccaactgctcctttagataatatccatatggtcaaaacctaagattgggctttgaggtattttccagacttttgcatttggtttgaccagctgatgccacctgaacccaagactcataccagggaactggctcaaccagtcctgtgaccttcatccagatactgactcagtgcacaaagaccattttggacattcctatgatttaatccccagtcaatctgcagcacccattccccatccccctacccaccaaattaccttgaaaaacactagcctccaagttttactatctctcatccttctcttggctggccctgcaataattaagttctttctttgctgcaatacctgctatactcaatgcattgacttttctgagcagcaggcaagattaacccatcaggctgctatacaaatacttcctgttaccttagtactcaaaacaatctatggtccctcttctcaacctttctttcttgattatttaatctctgttaccattcttacacttacttacttgcaataacataatacttactctttctgtaataacttgcaggttataattggatcatgagtgacctctccccaaattcatttatctcatcttaagcctaatgaatgaaaaaattatccataatgagagaaaacagcaggatccttttcataaagagatgtttgaaaacaagtatttttggaaataatatattaagatgcatatgtggctatatgaccgattctaatgtgtttaggccttgctaatatatcggtatgggacaatctccttcttaaaattgtcacactgtattgtttgcttcagtccaggatagcaggactttttgacctgaaaggaaaaggtaaggcaagggcagaggttggacccttgtcccttaggacaaagcaggcagatttacatcactgccttccaggaaatgacagcttacccccaaaagtaaagaaaaagtgtactttaaaaaatactagccaggtgtggcggctcacacctgtaatcccagcactttgggaggccgaggcaggcagattgcttgagctcaggtgttcaagaccagcctgagtaatatagtgaggcctcgtctctacaaaaaaaaaattttttttaaattagtgtgatggtgcaggcctatagtcacagctactcaggaggctgaggtggaagggtcacttgagtccagggggtcaaggctgcggtgagccatgattgtgccactgcctttcagcctgggtgacagaacaagaccccgtctcaaaaatatatatatgttttatacttctcactatagaaaagccatttaaagcattctgtgtagggggaataaagtgagacacaacctgagtattataatgagcactgaatttgtagtaaaaagagtaagtcagattcttgatttgcctcctgcaggctttgcactttgaaaaaattatttacattctctgggctttggatctcttgtttttaaaattcagagtttgaaccagatacccgcccacctcatacagcttgaaaactctacaagactcaagtttaaaacttctgcattccaataaaagttagaaccctaatcctcttgctacaggctagcaagatttctcgtatgaaaataatgacactgcaaatcagtacctgaggtctaccaaaacctcatgttgtcaaaaccaaattgtcatctaactatttgaaacccgccacaaccctttctcgtaccattaatgtcaaagcacaccctctgagcagaggcagcagtcactgttttttgttgttgttgttgtttttttctgagctttctcacatactaacagaggctttgatgcaaaatatagagcagtttccgacctaagggactttggaccaacagatatcatgctagccctaattttttctgtgggttttcacacgactgtgtgtgagaaaagcaagagatttcagatctaaacaagacccactatacgaactaatgaaaatattgggtgtgtggtctacaaaacagcctaaataagtacttctctctgaaagatccctttctccataggcctattcagattaatatctagttttcttcacattaaagtgtatatgacagttgtcatgataacttagtgaaaagtttagccaatagaatctatgtagcacttttaggcttctcctgctgtctgaattttttcttaattttctttctctcaaattcagcccacctaaagtttttgacagtctgtttaccaatcaggaaaagatttaattcttatttgtcttaaggcagacatccaggatggacagtgattatgggttcatggaatgttacaactggaagagtttataggattcatctggtccctcattttcctacttgtcaaatgaaaacaatcaccagggaatgtgttgaaaatatagatttttagtctccactccaacctgttgggtcagaatctcaacagacacaagagaatctgtacttttaacaatcataccatcaagcaaatttgagaaacgctgatataatcctatgattttattttgtaaagaggtttattttgattatacatggtcatatatgaaaaaaagaaaggatttcatagcctttcgtgaaagagttgactgcttcatatcagttataaaacataaattgaaaattattcctgaggttgaaacactcaacttgggcctctcaatttctgaaactcttgactttgatgatcgtaaaatgacaatgattattttatgttaattacagaagtcaccttccattctctcccaacctcaataacacctatagatgatatcaaatcgaggcatgtagagccacacactattttaaaaatgtagcattccttcatactcataaacattctcttaaccttaacatatgaaataatctccaaattctcacaaaaatgagtgcccacctgaactaaagtttttttacacctttaaaaatgtaattgtacagacgaaatcggtgtcataaggttactttcactaaaatagtatatccctctaaaaacaactttcacccatttgcaatcactggaaagtcatagaaggtgactagagtaactgatttctctcaagagcaaattcatgctctccaaaggagatcagggtctgtttagaaaactgaggtctaataatcaaggttgccacctggtagatctcatgttccacacatttggatgacttggctgatttcaggaatatgggaaaaatcagtttaacccaggctctctgaaccaatgtctcagatcaaactgatgacccccggacagcaaaaatgtgaccaaggtggaaggatcacttgagtccgggaggtcaaggctgcagtgagccatgattgtgtcgctgcctttcagcctgggtaacagaacaagaccccgtctcaaaatatatacatatgttgtatacttctcagtgtagaaaagccatttaaagcattctgtgtagggagaataaagtgagacacaacctgagtattataatgaacactgaatttgtactaaaaagaatcaggcttagccttcacttcacaacccaggttcacatgggtccttcctgtgcatcccaaggtcaggtttaaccacatcaacctcaaagccttccaaacagaaagcatttggaaacaacaccatctccccagatcattctacagtatgaagccgtgaaactgatggctctcggttcccctattcctggaacacaagtcttcagtttcagatttgggggaagagaaatcatcatagtatgacaattgggagaaaattacgtttttgttttcatatgtctccaaataaaatcccaatcatattttgtacaaaatttccatttttcattattaaaatttcattattttcaggcagccattgaaaaagattgtgccctaccagaatctggatatccttttgggcaacacacttttaacctctcttaggagatgttaatttgagtgagttttcaccattctatctactgcattcgtaaatttccctttttgattattctagtcatgtaacagtgagctcagcaaaacaaacacacgcacaactccaaagttctatgcttaatgtcagtgataaatttcaccaagtagctagaaaagcagctataataaagaatattctaattagtcttagaggcattatgtggcagaaaatatggaattttttttcttatgccgagtttgctaattgcccccaacaataggtgtgaatctcttttgttatacttgcagaaaatatataggtttgacttccatctgggacactctagagaaatgaaggagttgcataaaacttttaatgctgtgaacagctagacacaagttacatagctgctgaaatgaaactatacaacaatttctctatataaacacattctgaaaacacgttgggtaaatggagatattgttgccaccctagaattgatggtttccataaatatcagcatagcatccatactatcttttaattacaattttaaacctgcgaatataataccttgactcgatggtagtctcagagaatgtatgactatattttattccaccacatataaatttgtagaatagggtcttagtgcttagctctgtgagaactatctaactgtctgatgataaaagttgaggagttgtttctgtgaccaaatatgaacataagaccaattatctgcaaatactcctgtaaggtatatttccagtactgttttatgtttggcaggattgtggtggagaagaacagggagatgttctaagtgtttaaaattatttttacatcctagaatcaatgtcttcttaatatcatactctctggttggaaatcttcagaggacagacactcagtgaataacctttaactaatttccaacccatttgagtatgccaggaaaatagcatcttccaagttctagtctagttgttgtatctgtctgtgttgctttccggctgctatagcccagttaaattaccaagtgctgctgatcctttggagcttttcttaatcctcttttgacctctctaatttgaattattctgtgtcatcaacaaagatgtaacagttaggtctctgtgaaatcacaaactagaattgcaattagagtttcttaatcgttgtgcatattgtattgttgcatggggaaagaaagttttggaatttaattaaaagaaaggggaattgtcaatgtacttaatatgccattatattttttcttttaaaatatggagttaaagaaaagtttgattgtctttaatagttgcagttatctaccaatggggactactgaatacatatgctggggaaattcaatgtcaaggaataatgtatgcttgaggaaagtgtcattaaaaaagaatcagaggattagggattctctaagtttttaaaaatatatatattcttagttcttccggttctgggcccattcctttgtttgtagagttacaaaaaacatgattgtttggtagtaattttctttatccagctctttttttttttttttttggcaggtggtaaagtttattcttgtaatttcttgagaagcgtacagcatattttcatttagatgaagttcaaaaacaaaaataaactattaagtgagttagggctacaaaatgtggtcaactataaagaatatcaagggaaccataaacctgaaatctgggagagcagtttcatctgagtcaggaggaaataagtggatggaatcaggcggaagcacgtagcgtaaaagaaaaattgcaccagacactcattaaaaatggcagagagactttctttgaaacgattgtaatatggattaagactattgcagtaggggagagattgaactagactccattggcacaaaagactggaaagttttcaagcatgaagtgagccagagaacaggtactggaagatggtgggacgatgtgattaggccatctgcatttcctaattggcacttccagaatttaggctccttacccttccacagagactgagagactggggccctcccttcttgataacaacatttcaaagggatagctcccgggtccttaagaaaaacactcctgggctgtaaaaggtttacctctcaaagggcagagtaagaatttacaattgcaagttttctaatgtaagtgctctaagaaaagagaagtcaaaggcctagagtcaggaagaaagctgtctgaagtttagtcaagctgaaaggaacttaaagcctccttggtcaacagtaagcttcagtgataatgctgaagtcttgttttctaaaattaggtgggaagtccgctggtcattgtatcatgacaccttacaccttacacatactttaaacattttctttagtatttggtagaaacagaaatactacttaagtgctacttaatagaaagtaaatcaatagtattcaacagaagcagaaatgtatttaatagcactaaatagaagtattaatagcatccagtagatacagaaatgttcggcccagggtcagtggtgttgcccaggggaatagccttcctgggtaacatacgctgagattgctgagtggacaaggtatttccatgtgccgaatttacacagtgcacctctttcctttttcctggctgcactcggtctctctgaagtgaatggcagtatttttaccctcgatttactgaggaggagactcagtcagagaggacattaattgtttcttcctaatatcacaataaattctcattccctaaggctatgtcactccctagaactaagttatctacttagggaagatcattcgtcactgccaggtctccagggtaacatcaaggctttattgttgcaagtcgacaaatcgcctcccatctgtctgccctgactctgtgactgcagccgcgcggtgccctagatgtttccccagtggtctgaaagaattaatgtgcctccctaaacatctaacttaatgctagggaggggcttaggcaatgggggaaatccgcctggaagagatgttctggatgtcagtaggttgtgctaatctggctgtggtcatggctctattggggagacattgacagtccatctatgtctcactgaaagatctttgtgatatctacaggggcactggggaactaacatttcaagaaaataatagcgccagcaggtacagatggtgtctcagacaaagtttctgggctctccctgaagcttgacatcacatcagtgtgtgtgcaactctgcatgtggttggtgagtacaagggcaagagacagagagggtaggagtcagaccgaaggagctaccgtgctggagcccagtgaaaggtgccaggagaactcatggcctctctgctcagatctcaaaatcagaggaaatgacaaagaaccagaagaacaaaggagaagtgacatatgggaggagacacccaagggaaacgttcaaggtcccaacatgacaccttatttgcagaacatcccccaaaacaaagaaatcctctgcacttgttcagaggatttctgatcaacagcagccaacccacagaagcagcagcccttgggcgctaagcagaagagagaaccaatgaggagccattcacctcacctgctgacgcgaaggctgcttgccagttttaggggttttctatgttgatgagcactttggattgttctgagaaattccccctcaacacaaaacacactctttaatgaagagatcccatattcctggctcaaaaatttgacccttgaatcatttatatcatatcattttgttgtagtccatgaattcatgaaaggcacagagtgacccagggctggatatcagccaggttccacgcagacagagtgactgggatgactggatcccaacactcggtgactctcccattcaccaagctccctagtggtctagaataatacccagccacacacctagcgagggctcatagatcttaaaaagttaaagaactactgccactgagcagatttttcatgtctgtatctgcttgcctgccagatttccttcctcttccatctcattgctgaatttaaaaatacttctaagtctatatacattataattgggtaaaataagaaattcttcgtaatttagaagatgtatctctttcctgaagacttcctcctactccacccccaatctccagagacacatttttacccttaagatccttttttttcctttatttcttctaaaaaaaaaaaatgggatacatgttcagaacgtgcaggtttgttacataggttacatgtgccatggtggtttgctgcacctattgacccatcctctaagttcccttcctctacccgccactccacaaaggcccttgtgtgtgttattcgcctcactgtgtccctgtgttctcaatattcaactcttacttatgagtgagaacatgcttaatcctgagattctgagcaagacaacctcctttagagatgtctattgcttggaatgttttaatctgttagatttttgactgcacatattagctttaagaaattagaattgagcattaacatgttcagtttgttttcactattaatttctccataaattatgttagattgcattttttatagtatgtgcaagtgtatgtgcatatacgtatacacacagagagaggctttgagctaaggatggtggattgcccacatctgtttaaatctccctaccaggaaactagcagcaagcatattacttcttcttaccccctcctatattcctgccaaggagggaatttaaaaactctttcaaggagaaacaggtagccagtgatcatcaaacattagagaaagcattcaccgtgacagaggcaggaaaaagaaaattctaaaagaaaaactctagaataaacaaagacatagtaggaatcataaaaaaactgttaagtgagcaatgctgacatgcctgctcctggtaccattattagcagaaaagtagatacaaaatgctttgatataaatgagacatctatatctatcaggttaacatagagataaagtgaacagatgaatttcaagtgatagaatttcctgtgtgtagcacccacattagaggttataagaggataaaatttaaagtaaatttggaatcacccagtcttacgtcctcattatcagggctatggtttaattgttccccccaaagtgcatgtgttggaaggttgacccccaatgcagggatattgggaggttaagcctaatgggaggtgtttgggtcataagggcaccactctcatgaagggattgatgctgttatcttggaagtggattcatggtcttgggagtgtatttcttataaaagcatgagtttgaccccctcttgccttctgccatgttatgacacagcaagaaggtccttacgagatgccagcaccttgatcttgaacttctgtgctttataaattacccagtctcaggtattctgttacagcagcacaaaacagacgaagacagaaaatgggtaccagagagagcagtgttgctatagtaaatacctgaaaatgtagaagtagctttggaactgtataatgggtagaagcctggaaaatttggaggagtaggctgggaaaagcatgcattgctatgaacagaacatttagggtaattctgttgagggctcagaagagaagaaatataggggaagtagagattactaagttgttgtgatcagaatgttggtagaaatatggacaataaagggcattctgatgaagtctcagacagaaatgaggaatagcttattagaaactggagtaaaggccattcttgttataaattggcaaagaacttggctgaattgttcatgccctagggctttatggaaggcagaatttaagagtaatggactcggatatctggtggaagaaatttctaagcaaaatattgaaggagttgcatggttacttttaactgcatatagtaagattagagagaagagaaatgatttaaagacagaacttataattaaaaaagaagtagagcagaaagatttgggaaatctgtggcctggccatgtaatgaacagccatgtaaaggtgctgccaagcaaccctttaataaagggattagtacagctagaaagaagccaggtgctatttatcaagacagtgggagaattacccgaaggtgttttggagatctctgaggctctccctccatcacaagcccagagctctaggagggcagaatggtttcagaggagagtctcagagtgccctccttggtttctctgcccagggcggcctagggactctactccctgcattccagtgtagcagtcctcgaccactccagctgtggctcaagtgggcccaggtgcagctggtgctggtgctccagaaagtataagggtaatctttggtggtacctatatggtgcttattttgtaggcacacaaagtacattagctgtggggccatggtagcctctacctagatttcaaaggatgtgttggacagcctcagggcccaggcagagacatggtacagacagaagtcatagcagatttcccactatggcgatgcctggtggagccgtgggggtagggcaaaccccacaaccctgaccccagacctatagagctactagcatgtagccccagcctgggagagatgcaggtatgaaactccaacccatgagagctcctatgtgggctgaacccagcaaagctatacgggtgaggctgcctgagactttgagggcccaacctcaactccagtgtgttcagcacaagaagtcaaactttattctggagtcttaagatttagtgttcaccctgttggctttttggacttacctgagaccagctacccctttttccctgcttattcgtccttttcaaaatgggcatgtctatactatgcctgttttagttctaggattatattttggaagcacataacttgtttaacttcacaggctcatagctagagggaaatttgcctcaagtgaatcatgctgttagtctcaaccatttctaatttagataacattctggactttggactttgagttggggctgggatgagtgaagagtttagagtctattgagatagattgaatatattttgcatgtgagaaagacatgaatttggtggaccagggatgaaatgctataatttgaaactgttccccaaagttcatgtgttagaaacttgatccctaattcagcagtgttgggaggtggggcccagtgggaggtgtttggatcatggtggcactgccctcatgaaaatattagtgccattatcttagaagtgggctcatggtttctggggcgaattgcttataaaaggatgaatttggcctctcttgctctctcttgtgatgctttccatgtgatgcttttccaccatgttatgacacagcaagaaggccctcacaagacacggatgccttgatcttggatgtcccaggctccaaagggacgttttcattccaatggaatgaaaaacaattccattctttatacgttactgagtctcaggtattctgttataacagcacaaagtggactaagacgagcagttatgttatttacccataatcatataatatattagctgcagaatcaagtctagaattctgattcctaatttctagtcccatgtgatttctattacctaactccataaaatggatggaaatgtctgattctataaggaatctcaaagttccacagagtcaacatatagaacacataaagccaactttatgtgtttttttaaatgtaaatgtgactgatatctaatagctaaaaattcttatcaaatagctaattgttacataattagcacaagtggtaataattctaattactttctttcagattttagaagagctatgttgagaagatttgctaggcctctttaaaattttatcctaggaagttttaaatgggggctttacttttctcttgttaaattttccttaagctcagaatccagtattgcccactgatcaatattttcaaagatagatggcatagcactcaaacatttgaagacattactaaggccttgtcttgtgagttttcagaaagcagaagtcacttatatcttgctcccctcccccatcatctcaaactatgtcgaaatccttccaaaatggcaatcttcatgtaaagaattatttaaaaggagcagccattggcttctgacttaatataatggaaggaaattataaggcagatagtatgtgtatcagactgtctctgggccatgtccaatccgcagctgtgtgcccacttgttgcttctcttggtttgtaataaattttaatgggttacatctaggtcaataataaaaaataagcacaatgatcattcaattcactgaactctaagtctagctactagtgttccaactcgtataaaatctgtgttgaactataaatacagtagtccccccttgtccgtggttttgctttctgcaatttcagttacctgtggccaaccatggcttgaaaatatacagtattttgaaagagagagagaagaaccacataacataacttttattacaatatattgttattatttttctattttattattctcataatctcttactgtgcctcatttataaattaaagcttatcatagacatgtatgaataggaaaaaaacatagtatacacagatgattcttgatttacaatgttttgacttaaaaattttctcagctttacaatggtgggacagcgatccatgttctttgacttacagtagatttattgggatatgaccccattgtaagtggaggagtatcttttaggatttggtactacctgtggtttcaggcatctactgggagtcttggaacatatttcccatggataagggggaaactactgtacaattgtaggacttcagtatgtaattaggaaaagaaaaattaatttgttttcataaacaaatagatcattatagtttacatctgtaaacaatcatggtattcttctgtcaaaacctttccatatcttcttattagttacaaaatacaatctaaactatagagcatggtcttcaaggcaattcagtctgatgcctcaacctgtccatcaaccccatcaactgtattgtttcacttcaaccccagatgctaatcactccatatcatccagactgccttgaacgctgtatgcatttcatgaatctgtacctttcccaagctgcttccgcagttaaaattctctgatcctttgagactcagttcaagtatctatgatcctaggaaatctcttcaacaccccctctttgtcccctctcgtctcagcagaatccattgtttcttcttcattaaagttcccatagcatctaattctatttttatgaaagcatttctcagtcacaccttttttgccatttctgtttctgtttccctccccaaatggtgaatcactagaggaagtcaaggatcatcttatagtatccttgtgtctcaagagtttagtctacccctccacatgtttggtacccattaaatgtttctttaattggatttatgtaagagcttaagagtatttcccatgatttcatttgatgcccatagaaactccattaagcaggatggtaactgactccattaaagcaagtaatccaactgttttaggcttctccaaagagagagagagaagcaataggatggatggatagatggatggatggatggatggatggatggatggatggatggatggatagatagataaggaatttattaggggaattggctcatacaattatgaaagctaagtcccacaacaggccctctttttgttaaatcctttttgtattagttaagggcctccagagagacagaaccaatagaagatatacatctgtatctgtacatatgagaagagatttattaggagaattggctcatgcaattgggaggttgagaaatcctacgctaggctctctgcaagctggagaaccagggaagctggtagcatggctcagtctaatctgaaggcctcagaaccgggaaaattattggtgtaactcttagtctgaggctgaaggcctgagaacccaggtggccattatgcaagttcaagtccaaaggccagacagcctggagttctgatggccaaggacaggagaaggagagtgtcagcgctctgggagagacaaaaaaagaatttgtcttctgccttttgttatctctgggacctcagcaaattggatcatgcctgcccacatgagggaggatcttcctcactcagtccaccaattcacaccccaatctcctctggaaagacccttgcagacacacccagaaataatttttaccaactctccaggtatttcttaatccagtcaagctgactccttaatttaaccatcacagcaactgggcaccaaaaacagattagtgatttacctccaggtcatgtggtcagtcaatggcaggaccagtaccaacccctaggttttccaatcctccatcgcatactttgcaccatcgttgctcagcacctactgagaagtggggacatggtaaagagctaaggatgcttgcaacccaatattcatgtcacttcttgaggtttcagcagctttttcatgcatgcattggctccatggtcacatacaagaaccctctgctttctcatctaagagtttcagagatgccaaagtaacaggattgaggctgaacaatcaccttcatttctaatgtttttcctcacaaaccaattcagaaattcagaaaacatcttactatagtagttgtttcctgaattactaaatggaagctttattaggaagtattctctgttctttctaccaaggcagctttgttccttgggcataaacaaaactatcccttctctctctaaattgaccacagagccaaccttatataaattagaacttgttagttttggcttcagatgccggctctttctcttgaggttttcacctacttaaaattcacttgttgccctttaaattcacatctagcttaaggcaaatgtttgaatttctaaaataaaaccatgtgcccaaaataagcttagggaaaaaataactgaaataaatggaaaattctccaaaataagcaaaagcattaaaatgataatgctttaactttctgaactaaactgaaaataatgtatgctcaagataagcttacaaccacggagagatctctcttctacaaagccttaaagaaaaagcaggaaattacctcagatgaaacttcattacatggcatttccattcccaggatccatcctcagacacgttgacttaattgctctggaaaagagccccagcatcaatatttttcaactttctaggtggttctaatgtcggtcacaatcaagaaatgacatgaacaatattctgaatcatttcagtagatgttgactgcatgactgtgctttctaccagtcctatcccacaccccgcctttttcctaaaataggtatgcatgcagtgtgtgctctgcacacatgcacatacacaaacacacacacagtttcattcatttgtatattcattcaatcaataagttgaattttgccttcgtgcaaggaaccatgactatcagcacaaacaagaaactattcctgaccccaagagattcccagtctaggtgtggagaatatgaagcacagaaatgggaacaactctaggtaggaaatggaaagagagcaaatttttttttttaagaggcagctgggcacagtggctcacacctgtaatcccagcactttgggatgctgaggcaggaggatcattggaggcaaaatcaagtgtacctaacagttttagaaaattgtacatcgtatacttccactttccatcgtgacttctgttcatagtttatagatgtacaacataaagacataattcctaaataaacaaagcttctgtgaaagcataatgtgactctgcaggcctgctggcctgtcttattattgatctgaaaacaagattgacactactgtgattattctttagtgggaagggacattcatacttatttagccattgctatgctttcaggcaaatcaacccctcagtaactccaggcaaatgaatataggcctttcataaaaagtgtcttggagagaaagcccacaactgcaattaacaggaaatagctgatgcagtgtgacagcaagtccccaaacccttaatggaaggattgactgtcatgtgcatggagatgtggttagagaggaaataagttactgggttttgtaaggcaccaacttgaaaaacatgaaaagctgtggcaggccacaaacatggagcccatttggagtagaggcaggcaagtagaacggagaaccgtggcatttcaaccctagattaatctgagtgtcgcttttgctgccactacttaacaagagtagctgtagagagtgaaacatttttcctaaaatgtcatattttctctggtagctcctgttttcttctttgtatcacattatagctccacaaagttcatgcaaatgcataactaaattttgattatgagaggtctcagaatgcaacttgtttatgggaagaatatcattagtatagtttcaggcaattccttgcaaactatccccagtttaaaacagtcacaccttagtcaacaagcatctattgagcaacccactttcgacctggcattatggtaggtgcaaaggctaaaaaaaggtagaatgagatagaacctccacggaatatatacaataacaaattatttttttaaaaaactggatataacttgagaaactcttctgtacaggcattctggagtgagctgcaatccatcattattcagaaatgcattcatgcattacacctttgtcaagccaagttccaggttctgtgcttggtgctgggaagattgaaaggtcagctgaagttacagaaggccacgatgccagcacagctgctgcctactctttcgcctgatttatttctgttatttcttttacaattgtgattaaaaaaacacataacaccaaattgacgatcttaaccatttttaagcacaagcagagtcacgttcagtgactccacttcagtcaagttcagtagcattaagtagagtcacgtttacgtgcatctggtctccacaactctttcatcttgcaaacccaaactctataccatgaagtatccaaagtactcatatgtatcaaaacagagagtaggtggttgccaggttgccagggcatggtggagggggaagggaggagttgttgcctgatttctttttaaagctcagtcttccctttggcttctggttctaagcgtgttagcatcacggccccttttcattatcctaaaggacagacccagccctggttctgcaggtgctgaattctacttgactccaaagaggctcagcctctacctgcacccaggttctgctaacttggtctaccctctgttgtttttcctctctgttttgttcccatttgtaagatctctgccaaacttacttatttgctgcttttcacagacactagaccataccacctcctgggtattcacgatccatgcctggcccagctgactgttctcttattccaggctgttcgctgtttacctcgtccctcttcagcatcctcaatatgcctgcataatgcatatccatttttctccccaaattaaaagctatggccactgtatgttgaaaaatgcttaaaaccccacctaaacattccaggaagcaggaagccatgaatgactttaaaccaagaacagtctcaaaaatgttgtggtttccagtatgtgagtctcggacttcagcatattgctgttcatatgccacacaaatgttctgtaaagtcccattgagaattatgtgcaaatttaaatgctctccagacaatttcaaatatcagctttgatgcaagacttcacctgctaaaagcatctctttatggtttgacactacatctctgacattttgacgtgatacatattccatcagcctgatacattgccacctcccagtgagtcacagtgtcactaactcagaattaaatatgttgctaaaccactttacagcccttgcaaagcacataaaggctgtttgacaattacccccaggaaggcaaataatcagtacacctctgattctcttattattaaccattataaaatcatgtgctgtgatcaaggtgtgtaacaaagacattgatttttataagactacccaggaagcaaatacatattcttgatatacgaaacacacaggaggcctcttcattttcctttgtgtctttaatttgctcagagctgctcctcatacagcactggctttcacctgtcaagctaaggctttaattactgagttatggaaaaatcattgccaattgccttaactacaataataaagaatatcttacaaaggataagaaatcttttttcttcggctctgtagttaaaagactagttctagttttaatctgaacttttctatttctctccctatatttccctttcttcctattttaattgctggttagataattaagtaggtacctgacctgcaccaaatgtgcttgggaaagtctctcgtattttcgttttgctttgttttgtttctgcatgccattgaaacccctgtgttaattattctttccttacttgaagtatcttatacaacctttcttcaccagtatccttttcactaggccaaatacttattttggagtctcaaggatgattttctaaatcttttcataaccgcttttagcccttactcagttttattgtgcctgcccctcattgcacaaagggatatatttgactattccatggcatatttgactttgtaattcgtaaattatttttcatgtcttacatggttaaagatacgtttcacttgagcttgtaacagacataaaaatgacccatggtaaacctgtcgtattagaaaatcaaacaaaaagcataaggagataacacggtaaaaatgaaaagagtacaagctttagacccgtgtggatccgagttcatatctaacttggccaactaatagcttgttaattatgttaccttaggttgtattttttttttttttttttctaatttagtctcggggtctccgtgttctagctccgacccaagggggttcccgggacgtggttgtggatgttcagtgtgcctttaactggatacttctttatcctggcagacggcctgatgcccaggtgtgacttgtggccaggtgtcccacaaacaggaaaacctgtttacactggcagatggccttgtggcgtgctatagtctgaatgtctctatcctcctaaaatccgtaaattgaaacctcattcctaacgtgatggtgttaataagtggggcctttgggagatgattaggtaatgagggcagagccttcatgaacaggattagtgcccagacaaaagaggcccaaggaagcttgtccacctttgtgccatgtgaggacactgctggaaggcaccatctatgaagcagagagtcggccctcatcagacaccaaatctactgctacctctgtctcgggcttcccagcctccagaactgtaagcaatctgctgttgttgttgtttacaaattacccagtctaagatattttttatggcagcccaaacagactgagacatggcttttgtctgctctgtgtctagtgtatgttttgttttggttcggttttaagtttgtttggtttttggtttttggtttcgctttgtttttgtagacaacatcttactatgttgcccagactggtcttaaactcctagactcaagcaatccttcgcctcagcctctcaaagtgctgagatgacaggcgggagccaccacgcccagccaccctgtgtctagcttattcctaccaagagaatcactctctgtgaaagctctgagcagaaggagagttaggttcgcgtgtgttgctcaggtgagacaaagaggagatcatacagcaaaacacatgaaataacagaagcagcgtttgactcacagatccagagcagagagggcagcctgcctctcagggccaacaggaaaggggagctgtcctggacacgcaggctccaccagtgtggggagcaaaagagatcacaagagacctcagggcctaagactttgttggggtctcaggagttacccaagcaggtttcctgctgagagttctaatgggggtgggtggtggggggcgttacagcaacaattaccagtttcatggagccacactgtgcctgagcggtagtaactgtggcatctccatgcagtccatgcagcgggaggggtcttgggcgtgagtcaggtaggttgtattgagctgtcccctggggaggtgggcactagcagatacctggattgaccgccttgaggagctaggaggaagcagagaactagaaatcatgtcaagattcactaagccctgcatctgctatgagaaagtccaacttacaatcaaaatggatgcccaggcaacataaaattgtaagatttcgctacgccttaggcaatgaaacttggctgccttccagtgaatatttactgagcgtctagcttatttgagaaaccataatagacactacagggactgcgaagaatgggaaataaaccaattacacaatcacccacatagcagcgatacaaggccagccatatcaaacaacccaacagataaacagttcatatgttatatggtgtcagaagtaagacacatcaaaaaatggtaaaatacgtttgatactactgtccttataaaatcaccaaccataggaaaaatgatttttattaatgacagggatataatgaaaatagtttatgtgtgaaaacacataagtaattacataatacattatgatcaaaattagatacagcattgctgggcaagacctttttctcctctaatgctgtccttcaatattattaccaaaatatagcaccagtttttgtttttgtttgaggcagggtctcactctgttgcccaggctggaatgcagtaatatgatcatggctcactgcagcctcaacctcctgggctcaagtagtcctcccatttcagccttccaaagtgctgggattacactcgtgagccattgtgcccagccagtacctggttcttaattaactatatgaaaggcaaaatctgttttgctgctgagcaattatagtactatgcattatgtgtgtgtgtgtatgagtgtgtgtataacatgtagtttatatccatatataaactacatatagtttatatttaattgagtgtagacaatttataggttataatatctttagttataacattcacatgggtgtaattttttatactattctaatttatcattcctttctgttttaccttcaactctggttgaagtaatgtagttactatctgttttccgagttagacttccacttttcctctctggctacctgacaccccaagctagtgtaggtggctatatcattgcctggaattgaagtttttaagcctctgataattcagtctgtagaagctacccagctcaagaacaaaggggaaattacatatttcataacatgcttcaacatgaatgcatttaattagtatttataaatttgaatcaaaatgcaggaaatattctaaaaatataatttctctagaagagttatataatctctattaatgtaggccaactgcttctgtttcaaacacagaagaatgttcttcaatttttcatttgtgaaactgaatagtctcttctgaaagagtatatagtatttttccttttgggaatacaaaagcttttacaaaatgattatactaatcatcagatataagagtagtaccaattctctacctagaatagctgttaaccatggcacttggtgaattgggaatagacttaaatgatgcttctccttgggcccccacctccccaactcctacctttctcgaaaccaggctatttctctccaaatctcctttccttttgattcttcagttcgtgctacatgataactacttgccattggtcattaattatggtcgacgctcattattcacaggagtatgacccataaaatcactgcaaacactgaataagttaatactgaaccattgcccctagagggaattcagggttaagttcctgcaagcctctggtcacagtatattcatcaacctatcaatacataacgttattttatgcatgtttctgctttaagacatcttacttaacatatgtttttgattcattaacactgaactcatggccaacagctctataactaatgtctgaaaaaagcttatctaataggcatgttttccccataaggcacatcacagccttcttgtgcttaggaacactggacgacactcaacactgcgcttgggggccatttgaaacagtaatatcaccaataaaaaaaaagcacaaaaatgtcagggggaaatgtggcagtaaataggctgtgaaaaagacatttgtttgcagtatgagctaaaagaaggcagggcatcaccttgttctacatcagtagggatcatgagtgttatgccactcaatttttttgccagcctgtgtgtacacgtgtcctcaaatgaccatgaaagcactgcaagtatagatttggggattacaaataaatttcaacaagtagatgagtttgcaaacatggaatccgcaaataattactgttgactacaccatccttttgaacaaaaataaaagccacaattcaacttgagattggttatagatggcaactggcatttagtgagcacctgctatgagctgggtgccttacttttttttttgttttgagacagagtctcgctttgtcgcccagtctggagtgcagtggcaccatctcagctcactgcaagctccacctcccaggttcacgccattctcctgcctcagcctccccagtagctgggactacaggtgcctgccaccatgcccagctaatttttttttttttttagtagagacggggtttcaccctgtgagccaggatggtctcaatctcctgacctcgtgatccgcccgcctcggcctcccaaagtgctgggattacaggcgtgagccaccacacccagccactgggtgccttacttttagtaacacattgacctgggatgtgatcaactcgagaaccacatcactgtcatgtagctgcatggagctgtatcactcaacttctgggggcttatgtttcataacaattatcttttataaatgttcaatttaaaaatgaaaaacttccccaccccaatcaccacctcctttccccctctcccttccctttaatgaaccatctaagggaaggacatgtgtgcttctttgacatttcttcacagaatccagtccaatggcagggaggctgggtgagggtcagtgtcagcctagccagtagggaatccatggagctggggcatgtcaggggagtgtctcttactgagaactctgggtcctcttggatcaaagaatgtgcaaattgagctaagagatagaggggaattcgagaagatcacctaaaatgggcaaacaggaggaagctagatccaggtagcctgggagtcaagaacagtgagccctgtgtgagctaaaaaaccagaagcaaaccttggccaatggctggagctggtgtttttgctcaagcctggctttcatgggctccccttgatgtgagtctcagagtagggctggttaagtggccaggacctgagaaataaaatctcccttatatactcttgagagaacaagtctaacatatcagtaaggtaatagctataaaaatgtggctaggccgggcgtggtggctcgtgcctgtaatcccagcactttgggaggccgaggctggtggatcacctgaggtctggagtttgagaccagactggccaacatggtgaaaccccatctctactaaaaatacaaaaaaaattagccaggtgtagtggtaggtgcctgtaatcccagctactcgggatcctgaggcagaagaatcacttgaacccaagaggcagaggttgcagagagctaagatcatgccattgcactgcagcctgggcgacaagagcaaaactccgtctcaaaaaatagaaaaaataagtggctaagtcagtagtgaaactacgaagctaacttattacatttttcaccttttgaactttcaaacttgagtcatttatggacatctttgaagggaacagttattataaactctcactgttgacctaattaacattataatgtcaattatatatgtatagaaagaattctagatatacactcctgctaatatatttctaagattttttaatgttttatgatatacaaatttggatataagaaaaattataaaaccaacaaaattaaaactagtaaagtgaatgtaacgagataggctgtatagttcacaccacacaatgtcgtttagtcgacagtggaccgcacagataacagcagttccataagattatagaggagctgaacatttcctatgcctagtaacatcacagctgttgttaaggtcctatcacaacacattactcctatgtttgtgatgacactggtgtaaacaaacctactgcactgccaggcatatagaagtgtagcttatacaattatgtacagtaatacttgataatgataatatttgactatgttactggtttatgtatttgctatattatattatacattttatcattcaagtgtattccttctacttattttaaaaaatttgctgtgaaacaggcagggtacagtggctcatgcctgtaatcccagcactttgggaggccgaggcaggtggatcacctgaggtcaggaggttgagaccagcctggttaacatgcagaagcctcatctccatgaaaaatacaaaaattagccaggcatagtggttcaccctatgatcccagctactcggaaggctgaggcagaagaatcacttgagcccgggaggcagtttgcagtaagccaagatcgcgccactgcactccagcctgggtgacagaacaagactctatctcaaacaaaccgaaacattaagtgtgaaacaacctcagcaggtccttcaggagggattccagaagaaggcattgttaccataggagctggcagctctgtgtgtgtcactgcccctgaagacctcgcagtaggacaaggtgtggaggtggaagacagtgatattgatattcctgaccctgttaggcctaggctaatgtgtgtgtttgtgtcttagtttttacaacaaatatttaaagtacaaaaatgaaaaaattcaaagtagaagaaaaggctgatagaataggatataaagaaaaaatatttttgtatggctgtacaatgtgcttgtgttttaagctgtgttatcacaaaagagtaaaaaagttaaaagaaattaaaagtttagaaagtaaaaaaagttacagtaaactaatgtgtattaaagaaaagtatttttttacaaatttagtgaagcctaagtatacagtattttttaagtcaacattagtgtacagtaatgttctaggccttcacgttcactctccactcactcactgactcacccacagcaacttccagtcctgcaagctccattcatgataagtgccctatacaggtgtgccattctttttatcttttactctgtatttttactgtactttttctatgtttagatatatttagatacacaaataccattgtgttacaactgtctacagtatttagtacaataacatgctgtacagatttgtagcctgggagcaacgggccatagcatatagcctaggtatgtagtaggctatacagtggcagtttgtgaagtgcattctgtgatgtttgcatgacaacaaaattgcctagagacacactcctcagaatacatctccatcgttcaggctcagcaatgcatgactgtattagtaaactaaatttccactttcaatgagaattttttcagtgtagcttgttttgagttcattttgcctatacactataagtttgtgataattcaattttgctactacttttttctaatcaaactactatcaaatctccacccacagagcatacttttatgtaatttgctttcacttgggccaaatatcatttttgtattaagttggcctatgttcttttctcaataggtaaccaaaattaaagcagtagcatttggcagcaattacaaacagaaatgagagcatttatgtcctggcgggagttggttgttaagtggccatccggaagttatgcaatatgttttctttctcttttcttttctgtttttttttttaagattgctattgaaatgaaaacagaaactgcaccaactgatgttaaagataaatacaaagccatcgtaattaaaagagtatgtcacaaatgcaagaataggcagaaggatcactggaactgattagaatgtcagaatactgtttacataagaagtagtgcatactgaaactggcaatttaaatgaacggggatcctgcagtgtaaaactctgaaataaacaaacaaataaataaacagggatgaagacaaattttgctaagaaaattatgtgactatactttaaaaaatagtttctattttacgttagatgctaaaatgaattccaaagaattacagacttcaatgtgcaaagaggaagaatgcatagaaaagtgatactaaaagcaattcagtatttttctgttctctaaattttaaaaagcccttgtggctgggcacagtggctcacgcctgtaatcccagcagtttgggaggccgaggcgggtggatcacgaggtcaggagatggagaccatcctggctaacacggtgaaaccctgtctctactaaaaatacaaaaaattagccgggcgtggtggcaggtgcctgtagtcccagctgctcgggaggctgaggcaggagaatggggtgaacccaggaggcggagcttgcagtgagctgagatcgcaccactgcactccagcctgggcgacagacagagccagactccgtctccaaaaaaaaaaaaaaaagcccttgtaagcataaatacaaaggaaacttggtagatatggcaacataacaattaaaagttcatgtaagtacaaaaatcaacaaattaaaaactgagaaactggaaaaatatttgcaatacattgatataaaaatcataatatgtttttaaaaacttttaaaaactagcaacaaaaagtaaaagatgaacaaccaggtgatggaaaaaaaaaaaaaagatccagaattgttcagtaaaggtgtaaaaagtgtttccaatcaaagaaatacaaactgaaacaagaatataatattttattttggttttggttttgtttaataagcagaaaatggtgaggcatttttgacaagcaattttgcaagacagatcaataatctttaaaacgtatgtagttcttgagcaaggattttcacctctaaaattatatttcaaagaaataattgtagaccacatgcaagattttttttacagattatttgtcataaagttatatataattgtgaaaaatgcaaatcaatgatatctgtcacccagaaaggaaggaaatggttaaatacatttaagtttagccgtataacagtattccttaaaaataagtctcctaggccaggcacagtggctcacgcctataacccagcactttgagaggccaaggtgagcggattacttgaggtcgggagtttgagaccaggctggccaatatggtgaaacctcatatctagtaaaaatacaaaaattagctgggcatagtggcgcacgcctgtagtcccagctactcgggaggctgagccaggagaatcgcttgaaaccaggaggcagaaatttcagtgagcctaaatcacgccactgcactctaggctgggtgacagagctagactccgtctcaaaaaaacaagaaacatcacctaaaaaaaagtctttgaagactattaacatggaagcatgataatggtataattttaataagaaattatgatagaacactgatagaatattatcccagttttacaattccacatgtatttacatgtacctgggaaaattataatgaaaatgttaacacatttttttcttgtcagtaagtgcaggggaaccttacattttctttatggttttctgattattccaaatattgtaaaatacacattattcatatacttttaaaatgtggatcttaactgttttcctttaatctgctatcttacctttttaaatctaggaaatgtatgtatctcaaaatggtaaaactgaatatttaatattctagaaattaatgttttataaatcttaattttcttctcagtaatattgtataattttaaatattggcagattgtcagctatggctgtgcctatttaaagccaaaactcctgccaattttgtgaaaacttacgctcattatctagatttttgtttgtagtacgataaatattttcaccgtactttacctgctttggcaaaagatagatggcagaagaaggagctgattaaataaccaataaatacaagagaaaatctgggacattttttgcttttattattactttttataccattatgctggtaaattatttataatattatgattatgctaggattatagaacgaaaggtaataagttttatggattgtcagtaataataattactgtaaattgtcttttaaaataatgaaggctaaaatacttaggtattgagagtgttttcttcttgctactctgtgatgtatcgttgcagcaggctgagataatggaaaaggctgagagctacaagccaaaaagactgggtgttgagtctctaattccacttcttttttttttttttttttcaagacagagtctagctctgtcgcccaggctggagtgcagtggtgtggtctcagctcactgcaaactctgcctcccgggttcacgccattctcctgcctcagcctccagagtagctgggactacaggtacccgccaccacacccggctaattttttgtatttttagtagagacagggtttcaccgtgttagccaggatgttcttgatctcctgacctcgtgatccacccgcctcggcctcccatagtgctgggattacaggcgtgagccactgcgcccggctaattccacttcttattagctctgggattgtggacaatttctctaggcagagcttcctcgtctgtaaaatatgaatgagtctaatatgtatgcatctagtaatctgatttaatcacaaaatgggactagactatacagtccttaaagaatctatcactatgacttctctcagtggcctttttttttttttttttttttttttacagagctggataataaagagcttagaattttattcctgaaaggcaactagagtgctaggcattctgggtttctgatagaagacatgcacataagctttagcaaacactcagaactctatgctccctaactacaacttcgccagagtgcagaggccaactcttttcctttaaaaaactaactccaggatgtgttcacatggtcaataagatctatagttctttgctgatcatcccctgggaaacttttaaaatgaagtctgacacattacaaaccatgcacagaaacaaacaatatcagtaaaactctcaagtaatgcgtggttttgagccatgtagagtccaggtaagccttccaagcttggttaggtgcaaaacatactttctccagtatgtaaattaataggaatctttttttttttttttttctgagatggagtctcactctgtcagccaggctggagtgtagtaccacaatctctgctcactgcaacctcttcctccctggttcaagcgattctcctgcctcagcctcccaagtagctgggattacaagtggacaccaccacgcctggctaatttttttgtatttttagtagagacgggttttaccatgttggccaggttggtctcaaactcctgacctcaggtgatctgcctgcctcggcctcccaaagtgctgggattataggtgtgagccaccatgcccagcctataaataggcatctttgatggccttttaaaacaaccagactttgtaggctatctgcaaaagataatagtttgaaattttaatatttatttaaatagtcctcctgatggtaactgatcactaacttttgaagtgcgttgggttggactcagtaaaaatctcagcaatagcttataggaaattattcttctgttttctaaggcaggaggctatgcacccgtgtcatctaaaagagtggcccatggtgctatggagcaagccaaatcttcattgcagtccagttctgtcatttaccaaatctgtgacctccagagagctgttttattaatctacccctcagcttcttcatctgtaaaatgggacaatgatagcccttctcttccagattaggcacctaatgcagaacctagtgagatctaaatatatattagctacatctattattatgtttataaagacaaaggataaatggtagtcctgttttgtcccactcaaagctgttctctgagccacaaaaagactgtttcagctgcatgccaagttaacacattgcagttaagaaggaaaagcattgcagttaagaaggaaaagcattgcagtagagactagtccgtgaacatctttgtcctcaccattcctatcgccttcttttaaatgaaggaggcagtgggtttcttatattttggtccccatgattttgcaatttatagccttgataacctggccacagctaattaagccaaggttcggggctcattccttaggccgtgatgtgcaacttggcctgtaccctctaacatggcttctcatgagaactctacctaacagaaagttctgtgttgaatagcgatgaacggattcactccaaccttctctcagtgactttgaataaaagatatgcagactgtatagcagcctaaagagtgggctctgttccctcgcaaattttagcatactcattgagaagggagggagctttggggagacagtgagagaagagaatttaaacattgtgggcaatttcttctgcccttccatttgctgtggaattttccagccattttatgttctgtggatttttcatgcttgatatggttggtttctgggatgtgtttcagtcaacattgacccaaaaaccatgcagtcagttttctgtctaaaagccaaagctgtaacctcactgatattgcagaaatgtttctatcactttctgacccctaaaagtgcatgtctcttagatcatagctttgctggtatcaagattacatttttaacagtataaaccttttacatatgcagtagcaattagaatgctctccccaagaggaggacattctctgaaatcccaagtaggagtgaacccagagtagcatagcatatctgctaacttgattccatctgtctttgttgcaacatgctcactgagcatatgcccctaaatgaatatgagatgaagacaggatctgtggtccctcccgcaacattgatggggtaagtttttttgctaggctgagtgtggttcaaatatttttgtacaatatatatcctaaacacaaacaactacttcgtctgttgcccacccaaaaatatgctgatctgttttgtgctgaagtatgatcgttcgtgttggcgtccttgagaagtaatgggataaggtacttgaagggcgatttaagagctttccagagcagcccttggcttttcttaattttccagttttgcaacaacttttagagcccaatcctcatgtaagctttggatccactggaattaaaagctcagactttatagacaaacagacctgggtttgaatcctatttccatcacttgcctttaggaaagttgctcaacttttctgagtcttcattttctcatctgtgcccaccctcttattgcagtgaggcttgagtggtattcacagccctcggtgcagtcacttccatacataagagccactgttgttgttaacatagtttagaagttaagagagtcacaggcgtcgtaaaccctcagatagtaccagtcatgaggaagcagaattcactaagcggtgggtaggagggtgcacaagtagccaggtatacaagtagccgggagctgctgagtgtcccaggtctccatgaggatcaatcgctcaatagcttggatagtctgcgtgtggataacacatcagcaaggaatagagacaacgccttaaaacagactttcagcatttctggtgtcgaaaggtcctaacatgaggtctcactaaattcgagatttcatcagcctgagaagaactcagggtaaaataagagtagtaatacacaccccttttaacctgggttagaatgcgtttatgagtgtgaggtgatcttcaagtataaagccctatgtggatgtaacatgatagcagattataaatattaatagcattttaagtcaaagataactatttagaattgtgaataatagagaagaaagactgtgggcatcactgtacctcctaccctcagttaaaacttactgaaggaactgaaggttaaacattcttgataaccattgtatttctgcagtgtctcagaagtattactagaagacaagcatgggatttagagttaaactaaccttgggttcaaatcataatgctgccactccttgactgtgtgatggtggagaagttatttcacttctctaagcttcaaattctctatcagaaatgttttttctgtagctatctgcttaggaacaaagagaaaggcagcttcctgcatgactcagcttccagcttattattattattattattattattattattattattgttattatttgcttttgacaaagtgaactgaggtcccaagtttttatttccctttcacagagtcaagtttattggtataatcctgctaagaagtacttaaaacaaaaactagctattcacaaacaagtcaaatatataccctctagagtgtgttgataacgtgacttagtacatgaagagagagcatggtgttcaattgtgcaggtcaggtgaagctagtctttcatgcctcatcacaagtagcagatttccattaagaattggcaagctctcaaagctcagactctcccagagcagagcaaacaggcagatgcgaatacatgcctatcccagcagcatctgtttatgccagtggggagaaaccatcccctccacacacggttaaacaagtcagtgtgcagcctacctccagggcccttctcgttttgcctgggaatgtcctgggtggcttgtaggagatgaggatgcagcttggggcagccaaacctggggcatttcagaggcagagtataattcatgtggcaatacctggctctttatggcccgtagttttacacctaccatcctctgcacacagaaaactttaggcagaaatggagcatgcacaaccaggtctgcatatccgagagtggtcatttccttgcaaggcgtgtcgcttgactgaggggactagggggctgcagaggggctggcagatgtttggcttttggtgcagatatgagccaaataaattgaaaataggaagaaggagtacatgacctcacccaaattttaattcccatagaatagttttttgtttgtttgtttttagcgttgtatgcctaatagggtaaatgttattcaaaaaatagcccaggtgttagaaagacaaaatagttgttacctttagggaaatggttgtgaacaaaaggggcacacagggggtgtctgggccactaataatgttctgtttcttgatgtggattcgagttacatgggtgtgtcactttatgaaaattcatcaagggccatcaagggctcggtggctcatgcctgtaatcccagcattttgggaggccaaggtaggcggatcacttgaggtcaggaattcgagaccaacctggccaatgtgatgaaacccaatctctaccaaaaaaataaaaaataaaaattagctgggcgtggtggtacactgctgtagtcccagctgcttgggaggctgaggtgggagaatcacttgaacccaagacgtggaggttgcagtaagtggagatcatgccactgaactccagcatgggtgacagagtgagaccccatctcaaaaagaaaacaaaaacaaaaggtctggcacggtggctcacacctataatcccagcacttttggaggctgagcagactaggatcacctgaggtcaggagttcgagaccagcctgaccaacatggtgaaaccccttctctactaaaaatacaaaattatccgggtgtggtggtgcatgcctgtaatcccagctactctggctgaggcaggaaaatcgcttgaacccgggagagggaggttgcagtgagctgagacggtgccccattgcactccagcctgggcagcaagagcaaaactctgtctcaaaaaaaaaaaaaaaaagaaagaaagaaagaaaattcatcatgctgtatacttataatctgagtatttttcttcatgtaggttattaaaaaacagcagaaatattcttctctcaaaagaaatttctatattttaaaatatgcatatttatactatacatatatttatatttaaattatatatatatatttagtaaggaggggaatacatataacttgatacaaagtctgcactaagttagaatatatctaatgcaaattaatacttgagtgcatattaagatatatcaaaatttaaaaattggtcaaggtttttaagtgctttgacagttacagtaaggtaaggttctacataaaataacatgagtattgtcagcttccaccttacatttccaggaatagtcatttttcatgcattcattatattcttttcagcatcatttgcagagtttttgaacttctaagctgtaccacacagaaatgccataacactcattttgactatttcaacaaagtattataactaagccattaattgatccactagctttgctgttgggaaaatttacttattttgtaaatacagccacattgacttttaaagtcatctaaataagcttgttattaaataaaaatgttttgaaccttaaaactgctttaaatgattttaaataaatggtttatatttttttctcagtagtaataatttttctgaagtatttgcttattgtttttaagtgatttctttatacatatatatgtatatttacatactatgtgtatatattaggcaatattaaatgacctgaagcttttgatcaattctaatagaacagacaattgcaattctaaattagctctcataaaatggaacattttgcaagtagctaataaatatttgttgatcaatagttataccttgaatcctttatctattagaattttccagacaacaaactcatattgtttctcctttaggttcatttggatgtatcaacatagtaactcttgttacaaaaatattttaagtttaaaatcaattatttggttaaattctgtatgcatattttaatagttaatagacaaggtaaaatcagctcacttccatgtgttcaatatttattgcttgaaaattaaggcttataaattagagtatgctaactatgcctttttgttatagatcctcagcgctgttggttgtattatggaatagttaagtataggctctgctctccagacaccaaaggtttaactcagctctgtctttcaccaggcttgagcaccaaaggggaagtcagagaaaaagtaacagcaagtgaaataaaaatagaattctcaaaagcaatagttgaaagacaagaccacagaatggtatgatcaaagtgttgagagaaagagaaacagaaattgagagtttgagaccaaaaggtttttcattaaagcaatctctaaaggatttacttaatttttttaaataaaagaaacccagaagaaatgtctgaggtgtaagaagtattgatcaaagacattaatgaagatataggttaaaggtttttaaaactgtgtaataaaatattaacatcaaaattaatgtgttttaaaaaggagtaaatgaaacaattaaaaatgaagtctgttagaaagagaataatcaaaattacagttttttaagatccttgtattttaagaggatttaaaagagtgattaactttagactttcttaagtatgtaagatagaattccaaagtgcccactttttaaattttttattatttattttttgagacagactgtcattctgtcacccatgctgtagtgcagtggcatgatcttggctcagtgcaacctccacctcccaggttcaagtgagtctcctgcctcagtttcccaagtagctgggactacaggtgcacgccatcacgcctggctaattttttgtatttttagtagagacgaggtttcaccatgtcggccaggcctatctcaaagtcctgatctcaagtgatccacctgcctcgccctcccaaaatactgtgattacaggtgtgagccaccacacccagccttcaaagtgcccacttaatattaaataatatataacttcaaaaccagaatgggggaggaaatggattaagaaaacaaatataaatcatctattcagaaagactaaacaatataagacaataggaacaagtctgtctttcttgcttttacatgtgtgcatgtgtgtgtgtagtctagatacctagatagttagataaatagatatagatagatagataaacagatatagatagatagatagatagatagatagatagataaacagatatagatagatagatagatagatagataaacagatatagatagatagatagatagatagatagatagatagatagatagatagatagatgatagagagagagagagagagtgtgtgtgtgtgtgtgtgtgtgtgtgtgtgtgtgtgtgtgtgtgtgtttagtccatggcagtggactaaatatactagctaaaagatcttgtcaaattagtttaaaaagaagctaagtggtttttttaagacacatctgaaataagaggactcagaaagcctgaatggaaaataatgaaaagagacataatatgcaaataataattaaaggaaaaaccgggtaactataatagcaggtaacaaagacttcaaaaacctttttagaaggtagaaaggatactgaattatggcaagcgattcattttgccagaagaacttagcaattttaaacttgaattcgcaaaatactctcaaaatatataaagcaaaaattgacagaagtgcagggagaaattgataactcaaatatcatagaagaaaatgtggcatattaatttcagaactgatcatttaggcacacgacaataagtaaaaatagaggtttccaccaatataatttaaaaacttgattgacataaagtctaaacaaaataaagaacacacattcttctaagatataaatgaaatgtttaaaacatttatgactttctaggggaaggtatcttaaaaatacttagaactgaaggacaataaataatcctataaataaatattcatgagatgcaagacaaagatagttgtagttattttacactttaaatgcttaagtaaaaaatgagttaaggctagaaactcatagctaaattcaaataaagtaaaagtatgtgatgatgtaagagcagagcttaatgaaataaaacttgaagttatagtagggaggatcaacatagtcacaagttagtttcttgaaaacagaaaatcctccagcaaaattggttaagaaaaaaggagaacaccacaaataatcaatacaagaaatgaaaatggagataattataggtagcagacactttaaatgacaataagagaataccatgaacaaagctggccaaagcatttgaaaatttaggcaaaatggatgaattccatctatagtatatatgtatcagaatattatttttattgaaagatattgtcactgggtatcgagttctaggttgacagttcattatttttttctttcttattttaaaggtgtggtcctactgtcttctggattgcattatttcctgtgagaaatctgtcattgatatgtttgctcctttatgggcaattgtgtcctttttctctggctgcttttaagaatggccttatgatatacctcagtgtagtttcttccattcatgttttaatttaaagccattatctcttcaaatattttcatcactctcccaacccccacttttggaaattcccattatacatattgtaccacttgactttgccccacagctcattggtgctctttccttttttcttttttcttttctagtagcttttttttcctctgttttttattttggatagtttctatcactgtcttcaagttatctaatcttttcttctgtagtgtctaatctgctgttagccctttccagatattttttctttttttaatttttttttttatttcagtaggtttttggggaacaggtagtgtttagttacatggaaaacttctgtagtgggtgacaacccactctttgggttgtctgtttactctgctgattacttcttttgaggtacagaagctttttagtttaattaggtctcatctatttatctttgtttttgttgcatttgcttttgggttcttggtcatgaagtctttgcctaagccaatgtctagaagggtttttctgatgttatcctctagaatttttaggatttcaggtcttagatttcagtcttcgatccatcttgagttaatttttatataaggtgagagatgaggattcagtttcattcctttgcatgttgcttgccaatcatcccagcaccatttgttgaaaagggtgtccttttcccactttatgtttttgtttgctttgtcgaagatcagttggctgtaagtatttgactttttttctgggttctctattctgttccattggtctgtatacctatttttataccagtaccatgccatttggttgactgtagccttatagtatagcttgaagtcacgtaatgtaatgcctccagatttgttatttttgcttagtcttgctttggccatgtgggctcttttttagttctgtatgaatttaggattttttttctagttctgtgaataatgatggtggtattttgatgggaattgcattgaatttatagattgcttttggcagtatggtcattttgacaatatttattctacctatccacaaggatgagatgtgtttccatttgtttgtgctatctatgatttctttcagtcctagccagagcaatcagataagagaaagaaataaagggcatcaaaatcagtaaagaggaagtcaaactgttgccgttcactaaggatatgattgtatacctagaaaaccctaaagactcatccaaaaaacctcctaaatctgataaatgaattcagcaaagtttcaggatacaaaattaacatacacaaatcagtagttctgctatacaccaactgcaagcaagctaagaatcagatcaagaactcagcctcttttataatagctgttaaaaaaaaaaaaaaaaaaaactcaagaatatacctaaccaaagaagtgaaagatctctacaaggaaaactacaaaacactactatcttttgtatttttgtttcagtttcattgagttttactccgatctttgttatttcttttcttctgctgggtttgggtttgctttgtacttgtttctctagttccttgaggttttaccttacattgtctgtttgggctctttcagactttttgatgtaagcatttaatgctatgaactttcctcttagcaccaactttgctgtatcccagaggttttgataggttgtgtcattattatcattcggttcgaagaattttttaatttccatcttgatttcattgttgaccaaatggtcattcaggaacaggttatttaatttccatgtatttgcatggttttgaggattccttttcaagttgatttccaattttattccactgtagtctgagaaagtacttgatataatttcaattttcttaaacttactgagacttgttttgtggcctatcatatggtctatcttggagaacgttccatgtgctgatgagtagaatgtctattctgtggttgttgggtggaatgttctgtaaatatctgttaagtccatttgttctaggatatagtttaagtccattgcttctttgttgactttctgtcttgatatccagtgctgtcagtggaatattgaagccccccaatattgttgtgttgttgtctatctcatttcttaggtctagtagtaattattgtccaaatttgggatccccagtgttaggtgcatatatatttaatattgtgatattttcctgttggactagtccttttatcattacataatgtacctcttcgtcttttttaactgatgttgctttaacatctgttttgtctgatatatgaatagctactcctgctcacttttggtgtccatttgcatggaatatctttttccactcctttaccttacatttatgtgagtccttatgttaggtgagtctcttgaagactgcagatacttggttgaattcttatccattctgcaattctgtgtcttttaagtggagcatttaagtcatttacattcaacattagtattgagacatgaggtactcttctatttatcatgctagttgttgcctgaataccttgttttttgtcaccgtgttattgtattgtatgccctgtgagatttatgctttaaggaggttctattttggtgtatttcaaggttttgtttcaagatttagagctccttgtagcaattcttgtagtgctggctttgtagtggtgaattatctcagcatttgtttgtctgtaaaagaccatctttctttcatttgtgaagcttagtttcactggatacaaaattcttggcttttaattattttgtttaaggaggctaaagatagggccccaatcctatctggcttgtagggtttctgccgagaaatctgctgttaatctgataggttttcctttacaggttacctgatgtttttgcctcacagctcgtaagattctttcctttgtcttgactttagataacctaatgactatgtgctaggtgatgatctttttgtgatgaatttcccaggtgttctttgagcttcttgtatttggatgtctagatctctaacaaggccagggaagttttcctcaattattttctcaagtaagttttccaaacatttagatttctcttcttccttgggaacaccagttattcttaggtttggtcatttaacataagctcaaacttctttgaggctttgttcattttttaaattcttttttctttttttctttttttttagtttgagatggagtctcactctttcgcccaggccggagtgcagtggtgctatctcggctcactgcaagctccacctcctggattcacgccattctcctgcctcagcctcccgagtagctgggactacaggcgcccaccaccacacccagctaatttttttgtatttttagtagagatggggtttcaccgtgttagccaggatggtctcgatctcctgacctcatgatccgcctgcctcaacctcccaaagtgctaggattacaggcgtgagccaccgcgcccagccttaaattcttttttctttgtctttgttggattgggttaattcaaaagcctcgtctttgatctctgaagttctttcttctacttgttccattgtactgaaactttccagcgtatttttcatttctctaagtgtgtctttcatttccagaagttttgattgtcttttatttatgttatgtatttctctagagatttttttgtccatatcctgtattattttttaaatttctttaagttggttttcacctttctctggtgcctccttgagtatcttaataatcaacctaccgaattatttttctggcaatttgaagatttcttattggtttgaacccattgctggcgagctagtgtgatcttttggggtgttaaagaaacttgctttgtcatattaccagaattgtttttctggttccttctcatttgggtagaccatttcagaggaaagagctggggtttaagtcctgctgttcattctttggtgccatggggtgatgccttgatgtggtgctctccccctttccctagggatggggctcactgagagctggactgcagtgattgttattgcttttctaggtctagccacccagtggagctactggactctgacctggtactggggagtatctgcaaagagtcctgtgacatgatctgtcttcaggtctctcagccatggatcccagcacttgctctggtcgaggtagtagggaagtgaggtagactgtgtgagggtctttagttgtagttttgtttagtgcatgggttttcttgaatgttggttgtgctagcagttagttggcctccagccaagaggtggcacttttaagagagcatcagctgaaacaagcttgtcctaagtttgcctgaataggtatttgggcttctcaggtgatgggttggaccatagcgctcccaagagattgtattttctgtcttcagctgccagggcaggtagggaaagaccactgggtggagccaggattaggcgtgtctgagctcagcctccccttgggcagggcttgctgcagccactttgaggatggcggtgtggttctcaggccaatggagttatgttcccagggggattatggctgctctgcagtgtcatataggtttccagggaagtgggggaaagtcgtcagtgactggcctcactcacttcccacacagccagcaaggccagtctcactcccactgcaccccaccgatagcactgagtttatatccaggtgccggtgagcagagctgaggtcttgtcccagactacaagcctcccagctgagaaagcaagcaggactttcaggccccacctctccccacctgctgtagcttctttgctcatatctacactttctgttcaccccctaccccacccctgccccagattgtgcccagaaaaattcatatttggtcaaaattattacaaagttcagctagaagtttccttttccctgttgtctttccccagttccactggcagccctccccaagaacctctatgaggtaaagtcagaaacggcttccctgggcaccaggaatgcctacagggctctttctgctgcttcttctagttttatatttcactgggctctctaaattcatttcagctctaggtaaggttaaattcttctcctgtgatctgaatttacatgttccccagtgagggtatgtgttcagaagtggactttccctcctcacgctttgggcactcacagtgtgaatttcactttgttgagtgtagatatttttatatcctatattatgcttaagctttgttctgggatgaaattaacttattgaaaacagttgatcctttggagacttgcttttagacttcatgaggtgagaccagcacagcccttttctagggctgattttttcccaataatgttataatttccttttgagtactgtacctaataccctgagttacaaggttttgcactcagactggtgggaacatgaattattcttaatctgtgtgagtaggttgttccctcagctcctttcaggtgagttttctctgacccaggttgttttattacacacatgaatttattggtaccttgctgaagacttaagggacacttctgcagatcacttaagttttctctctgtacagctctctcctgtctggtattctgttctgaagaccctagactaccaactctgtctcctcaagtaaggagctcaccaggttcctaagtttcccttccctgcactgagacccagaaaattttatcaggcagtaggctgaagcaattgtggggttcacattgtttgtgtctgtctctcagacataactgccctgccctgcctgatctctatgactgttttatatattttgtccagtcttttagttgtttcagacaagagtaagtcaaatcctgctactccttctcggctggaagtagaagtttctagtcttatgatttttaactgttgtcagctaattaaaatgtaaagttttataaggacttcataagtgtatgcaaatgctcctaaggctttcctggatgtcagtttaggcccccaggcttcaggattaatctttaattaatactctgagtggagacagggaaaagaagggtgaatgaagtttctgtggtctaagaaatcccaatagacaacttctggagaaatgacaagagagggacataagcaatcaaaaagaagggcgaggccgggcacggtggctcacacctgtaattccagcactttgggaggccgaggcaggcggatcacgaggtcaggagattgagaccatcttggctaacacggtgaaaccccgtctctactaaaaacacaaaattagccgggcatggtggcgggcgcctgtagtcccagctactcgggaggctgagacaggagaatggcgtgaacctgggaggcagagcttgcagtgagccaagattgcgccactgcactccagcctgggtgacagacaaagactccgtctcaaaaaaaaaaaaaaaaagaaagaaagaaagaatggggaggggacatatgcatctccatctcaactctctaaaactaagactcagacagagattttggtgaaaaatgtgtgcctaataaaatacttgctctaaaaattagattctagatattatctgaatatgtgccagtcactattctaagcattttacatatgtggatgtatttaattctctgacaactgcataagtaagctattatcatctccagtttatggataaagaagcaggctaagcaaattccccaagatcccatagttaaaaaatggcatggctcagatttcaatccaggctctgtaactaatatattatctgctaagaatatcagtcttatcatgtttagttctctggcttaaagtccacaacataataaaagtgaattgtagatgctgagatgaagatattaaatgtaaatacaacaaatacaaggaaaaataaaaactgacaatttgtttaaaagggcaaggacatagaatcctctgaaatagacattgcactgagaagtctatcactagcatattaaggaatgaagactcagataatgaacttgctgttaaaaaagcaaacctctgttaataacttttaattaaacctttgattatatttttaaatgttttttatttcttaaaaaacagttttgggctgggcaccgtggctcatgcctgtaatcccagcactcgggaggccgaggcaggtggatcacctgaggtcaggagtttgagaccagcctggccaatatggcaaaaccctgtttctactaaaaatacaaaaattagccaggcatggtggtgcacacctggtagtcccagctacttgggaggctgaggcagaagaattgcttgaacccaggaggcaaaggttgcagtgagccgagatcacaccactgcactccagcctgggtgacagagcgagactccttctaaaataaataaattaattaattaaattaaataagaaacagttttgcatttgaataattctgacaccaaaataatttttatcctggaatacactattcaatagtggtaaactttgttatatggaaaacatttcttatttctgagcaatatcaggtaaatgaatcaggaattatttgaattagaaggtattgttactaaccccctcatacctccaatgtactaaaactaatacatcttaaaattccttttaatcatttaatttttcttttttccaaaattttccccacataaataaagtagaatttagcctcttctacttcaaaaataaagtattttctaacaatgtttatcattataagtttctcagggctcaaatgtagaacatctttttgatagcttttcactctttccccaaacatatcccagttttatgagaccaagtacaaatatcttcctgtcacacatcatcaggagaatcttgccaggtgcagtggctcacgcctgtaatcccagcactttcagaggccgagacgggcggattgcctgaggtcaggagttcgagaccagtctggccaacatggtgagaccccgtctctactaaaaatacaaaaaaaaattgctgggcatagcagcaggtgcatgtaatcccagctactctggaggctgaggcaggggaattgcttgaaccaggaggtggaggttgcagtgagccaagattgtgccactgcactccagcctgggtgacagagcgagactccatctcacacacacacacacatacacacacaaaatatggataaaatatctagtgtgagaggaacagcagaaggagaaagtaatgtcttgaggaaggtgcgaatcatctgtaaatactttttagagtaatggaattcctagacagacagcttcgcaggcagtattgccattcagtatcattggcaaccttcctaaaaggaaaagagtaatgttaatgccatttctgaaggtatgaattgaggattttgattctttttccataaatacttaccttgtgaaaactcctctgcaatctctactgtcagtaagttttataaatgctgtatacaagtcttcaattcaccattgcctgcttgaggcttatttattttttgagaaagaagctggagaagtcatttgaaaattcatgggtagttcactcttcaaggttgtggtgtgctcttcaaatagctataaaaatttccaagagacaggaccactgaccctgcgcttcgtagcaaatagctttacttactcattatctgactagcgtattagttaatcatgtaaacaattatctttcttttcaggtggcaataattcatggcatctcctcccccttccaccccacacatatacttatttattgtcacagcctgatttataattgttttttaggatttcttcatatcctccctcctacctttacccctgagttcagaaaataataaacactctaaatctccaagcaatggaactcttctaagagttaagctaaagtctatcctaccaccttgctatattaatgtcagctcatttgatgtgtctgtagagcaggatttgtttggcaagctttttctgtaaaggaccagatagtatttcaggctttttgagccatgtggtgtcggtcacaacttttcaactctgccatcatattgtgagagcagaagtagacaaggtatgtttaaaaaaaaatgggtatggttgtgctccaataaaatcttttttatagacactaaaaacttgaatttcatgcaaattttatgtgtaaggaaataattttttaaaaatctcttctttaaccttttaaaaagacaaaagccattcttagcctgtgggtcgcacaaaaacaggcagcaggccatgggccatagtttgccaacccattatctaaacggttaacagaatgcttactacaggttttctgaccctcagcactagtaatactttgggacagataattctttgttgtggactgtcttttgtttttgttttgagacagcatctcactctgtagcccagactggagtgcagtagtgcgatcttggctcgctgcaacctccacctcccaggttcaagcgattctcctgcctcagcctccccagtagctgggattacaggtacccaccaccatacctggctaatttttgtatttttagtagagatggggttttgccatattggccaggcttgtctcagactcctgacctcaggtgatctgcccgcctcggccccccaaagtactgggattacaggtgtgagccaccgtgcctggcctgtcttttgtattttaagatgtgtcatatcatctctggcctctgcctactaaatgccattaacaccctacatcccccaattgcaacaactagaaaatctacagacattgacaaatgacctttggggacaaaattgcccccagttgaaaatcactggtctaatacactgaaaacttagaatacaccgcataaaatatgagctggtaggctgcgtagtataagatagcgtcatgtgtcacctgagagatagccattggattctcatgcttctaatgtagaaaccataataccgtggtcttccccttacctacagtttcattttctgtggtttcagttaccagagatcaaccaaagtctaaaaatattaaatggaaaatttgaaaaataattcatcagttttaaattgtgtgctcttccaagtagtatgatgaaatcttacaccatcccaccagagacttgaaccagccatttgtccagcatatccacgcggtagctgctacctgttcctgagtcacttagtagacttctggattattggctcaacagtagaggtattgcagtgcttccattcaaaaattccttactttacttttattatggtatattattgtaattgttctatcttattagttactgctgttaatattctattgtgcctcatttataaattaaactttacatagatgtgtatgtattggaaaaaaatatggtacagctgacccttgaacaacacagatttgatctgtgtagtcttcttttatgtgttttttttttcaataaatacagcaggccctccatatcaatgggttctgaacctgcaaccaaggcaagacacaaatatagtattcacaagatttgaaacccatgtatatagagagctgactgacttttcatctgggagggttctggatggctcacttccatacttgaatgtgctcggattttggtatagaagggggtcctggaaccaatcccccatagatagcgagagatgacggtatacatagggtccagtattatctgaagtttcagacattcactggggctctgggaatgtataacctgcacataaaagagaatttccgtactacctccaagttaataaccactgaagaaatcctaggcttaagagagcccgttattggaacttagatggtggcgttagagtgcttatgctttggacttaggagtcagtatcccttccccccagctttgtctctttctatattcctttcccatttttcctctttccacctccttacactcaaaccatacagtgtgcacctgacagtggactacaaagattaatattcgatgaaaggactttgtccatttgaccagaccacttgaatgatgaggtgggagccacagaatacatagttgatattaaattaagaatctaggccagacccggtggctcacacctgtaatcccagcactttgggaggccgaggcgggttgatcacttgaggtcaggagttcaagaccagcctggccaacatggtgaaacccgtctctactaaaaatacaaaaattgctgggcgtggtggcaggtgcctgtaatcccagctacttgggagtctgatgcaggcgaatcgcttgaactcggaggtggaggttgcagtgagccgagattgcgccactgcactccagccggggcaaaagagcaagactgtctcaaaaaaaaaaaaaattgagaatctaaattaatttatagaaatcctttttccataaatttatcttttctccaagttttcttctgatatgcaaagtgtgagacacctactcttagcttttagatagtttacaggccaatgacacacagtagatgatgttctgccatgatgtctcaaaggcagagaaacattcttatttttatcaacactttctcatccccatctttaaattattggtataaacaaacttctgcttctcactttagattataattttatcattttttacaattcatcaaagaaagtttttctaaattgcacggaaagttctatagaatgctgagttatgtattctaaagaatatttctccttcccattttttcatagctaaactgtcaatatttttaccttaacttcctacaaagtcctatagctatttgattacttgatgtttcagtataaaaaaaaattaggtcaggtgtggtggctcatgcctgtcatcccagcactttgggaggccaaggcaggtggatcacctgacgttaggagttcaagatcagcctggccaacatggtgaaaccccgtctctactaaaattacaaaaattagccaagcctggtggcaggcactggtaatcccagctcctcagatggctgaggcaagagaatcgcttgaacccgggagacagagattgcagtgagctgagatcgtgccactgcactccagcctgggtgacacagcaaaacttaatctcaaaaaaaaaaaaaattaataatgctgcttctgcctgaaatacatgatttccagtgagtgaaggaccacttgctctactgaagtaaagctactttactcaagtctctgaaggagtaagagagtcctgcagggcacatttgaacagctcactttcagatacaagtgataaaaaatggagcctcagcaacaacaacaaaaattataacttttaaagagatagaacaacatggtttgaaaaggaatctggatttttgcctctggttgctgtcattgacagggaaagtcttatattttctgaacttgtttttaaatccccccaaatagagggattagactgtgtaattccacaaatccgttgattttatgacctggctatagcttgggaaagcaaccacatagtaccgttgttacactccagagctattcaaatattgttatcaaagtggtgccaaaaatttctaatcaaatatttggaagagtttggtgatgagtcgaaagtagcctgtatgtctctgaattctgtgatgtttctcatttttcctccccgtacagtcttcataggtatttagacaagtaaacacctgtaaaggaagaatgtgggcaataagaatgaatataaatgataaatcacataatctgatgtaatgaaagacttaagttattacagaaaacctagaattaaatgaaatatttaaaaagtgatgtcttcaggaagtctacagttcagattcaagggtggcaaatactgtccatggagaccagtagttctcaggagggtgactttttttctccaggagacatttggcaatgactggagatatttttacttgggcatgttgttgatatctagagagtagaggccacggatgctgctgaacacctccaatgtgtaggacaatgccccgcaacaaagaatgatctcgcccaaaatgtcaagaatgccaaaatggagacaccctggtgtagacctatgatagctctgacttctttttttttttttttttttttttttttttttgagacagagtctcactctttcacccaggctggagtgcagtggcccgatctcggctcactgcaggctcgatctcccaggttcatgccattctcctgcctcagcctcccgagcagctgggactacaggagcccgccaccatgcccggctaattttttgtatttttagtacagacggggtttcaccgtgttagccaggatggtctcgatctcctgacctcgtgatccacccatctctgcctcccaaagtgctggagtgctgggattacaggtgtgagccaccgtgcccggccgatagctctgacttctaagtcaactgtgttcatcagtttcatatctcccctcttactttccaccatcacaaaagcctctgcctcctaccaaatgttagtaaatgcagtgaatgttagcaatctatttgaaacaaggtttcttggcattcatctagctgtatggataaagttttaccagcacaaactctgtatgcatggggtagactggatcagacagagcaatctgaaccacaatgttggatttccttcaagcttgagaaatattaatactaccatatatacaggcggggcatggtgggtcacgtctgtaatcccagcactttgggaggccaaggcgggtggctcacctgaggtcgggagttcgatactagcctgaccaacatggagaaaccccttctctactaaaaatacaaaattagccaggtgtgggggtacatgcctgtaatcccagctactcaggaggctgaggcaggagaatcgcttgaacctgggaggtggattttgtggtgagccgagatcacgccattgcactccagcctgggcaacacagcaagacttcatctcaaaaaaaaaaaaaattaccacacatactaacaatatgaaagttctaattcatatttaaggaaacatctgcttctacatgtgtttctatctgtggttctgaaaagcaaatcctaatttttatgaatgataatttctgggcctctttttgtctttccccagatgttccctgctttgttgcttaagagctgcatggcacagaccataaaggttgtgagctcttcccatttcaagaaaccctggggagattcaaataaacaaattcaaaatgccccttagagtctttaacagaccagaattagtacgttgtttgtttgaaaatctttctttttttcggatataaaactatacactcaagactaaatggaggcagtacaattacacattttgactgaattgtctcatcagtaaaagtatcacctggctaattgtaactctttagaattggcctaaactagaaaataaacaaggaccttattcaagtatttcctattatgttacatacatacaagttaccaattagaagttgatatacactattttgtttaaaaataaaattcagcaagcttctgatgatttattctgttcttgtttttcttaccagttttactgccaaaataaactccttctcatacaaagtctgggattataccacagagttactataattggattcaactttaatagaatattacaatattaattttaatagagtatggtttcagatattaaaaagattaatgtacccaaaaacataatcattgttttgttttttttttagacagaatcttgctctgtcacccaggctggagtgcagtggtgtgatctcagctcactgcaacctccacctcctgggttcaagcgattctcatgcctcagcctctcaagtagctgggattacaggtgcatgccagcatgccaggctcatttttgtatttttagtagagatggcattttgccatgttggccaggcttgtctcaaacttctggcatcaagtgatctgcctgccttgaccttccaaagttctgcgattacaggcgttgagcaaggcattgagccaccccacctggccacttcttttaaattgcataattttcctgttctctatttcatccaatctaaaataataatgagttttaaatacttatttttaacattttttttacacctatgatttgagaatatatatatattaggccgagtttcatttttgttgcccaggctggagtgcaatggtgccatctcggctcactgcaacttccacctcccaggttcaaacgattctcctgcctcagcctcctgagtagttgggattacaggtgcccaccaccatgcccagctaatctttgtatttttagtagagacagggtttcaccatgttgtccaggctggtctctaacccctgacctcagatgatccaccagcctcggcctcctgaagtgctgggattataggcataagccatcatgcccagcctgagaatagatttttgacatttttaacttgattttccgagaagaaaaaattacatatttttaaaaataataaatacattgaaatctagattttaaaacatgtttactttctctcaaatttgttagaaatgtcacaacaaatagctttttcaacctatgaacagtatttgtagaagggaaaaatgaggaagaaatgggcacatttttctagtgattgaatggtggtgtctacatcttgaataattctcactgcatatcgttgcttgaattgtagatctgtatggcatgtgacttgcctgggtctatgatgttgtcaacagaaagagtcaaattctgtaaaatatttgaagagatttcttctgagccaaatatgagtgaccaatggtcccgggaaatcctgaaaacatgtgcccaaggtggtcgggctacagcttggttttatacattttagggggacataagacatcactcgatacatgtaagatatactttggttttgtctggaaaagcaggacaactggaagccaagggtagaagggggccttccaggtcataggcagattctcatgatgttgcccagatgtcctattgtaatttcaattggttgagtttatctaaagatctggaatccatagaagggagtgtctggattaagataagtggttgtagagaccaaggctcttattatacaaagcctacaggtagccggctttggagagaatagattgtaaatgtttcttatcagacttaaaaaggtgccagactcagtgaattctctcctggattagggaaaagacctggaaatggaaagggattctctacagaagttagatttttccccacaagagacagctttgcagggccatttcaaaaattgccaaagaaatatattttaagacaaaatacttggatttctttcaggacctgctatctgtcatgtaatgctatactagagtcaggctggatttgggtgtcttattgctacagaaagtcttaagatctctattaatgttaatgctggtcagctgtgcctggattccaaagggaggagggtataatgaggcatgtgcaacccccactccccatcatgacctgaactagtttttcaggttaactttggaatgcccttggctgagaggagaggccaattcagatggctgtggggcttaaaatgttatttttggcttatgatgtggaggcagaagtaacctgtatcactgttgtgccaaagtctctaagagctaatgtgcagttcaccaagttgtctccctatgagagtcagccatcactgcaaacagcaacactccaggttgattgtggttctgtcagcttcatcctgcaccccagagtaaagatgacatagtggggagcctgtcttacaatgagcatatagcagatgcaagaaataaacatttgccttgttaagccactaagatgtcagggttgtttgtcctgcagcaaagcccagctcatcctgactgataaacttatccattcaagtgatcagcttttggtgtaaatgcccctaagaaaactgataaagcggccgggcacggtggctcaagcctgtaatcccagcactttgggaggctgaggcaggcggatcacgaggtcaggagatcgagaccgtcctggctaacacggtgaagccccatctctactaaaaatacaacaaaattagcctggcgtggtggcggcgcctgtagtcccagctactcaggagactgaggcaggagaatggcataaacctgggagacagagcttgcagcgagccgagattgcaccactgcactccagcctgggcaacagagcaagactccatctcaaaaaaaaaaaaaaaaaaagaaaagaaaagaaaactgataaagcctgatgcactacctacctatgccttgccaaagaatggtaataatccaaaaactgtttaatttagaccttcactatgcaatgcatattttatctaggaacacttttactggtatcagtgatcaaaattatagagcagggggggaaatgtgaggaaacaaatctcaaatgtcaacatacgtggggatcttgtttgcagatgaggaagtgcattctcaaagctgtgtgaattgtcctcatcatacagctattttcattgtattctttcacaaaaatatgtatgtggatggattcttaggtgttagagacggggaggaaagaataaaggagactcaaggcataggtggaaaccgtgcatacagatggtatatctttatgtgttgagcatttatatcatgcatctgctaagtactgcaatggaaacaaggataagacgcacagacttccctaaagaaatgtaaaatctcaatgacaaagaaacatgtgaagaagttagtatcttaagcaaaatgatgcaattcatagtaggccactgtgtactggaaaagtaagggctattctattccaaagtgtgatttttttattgggtgagggggacctgagaaagcttcatggagggtgtgatagttaatactgagtgtcaacgtgattggattgaaggatgcaaagtattgatcttgggtgtgtatgtgagagtgttgccaaaggagattaacatttgagtccgtgggctgcaaaaggccgacccacccttaatctgggtgggcaccatctaatcggctgccagcacggctagaatataaagcaggcagaaaaaccttgaaaagactagactggcctagcctcccagcctacctctttctcccatgcttgatgcttcctgccctcaaacattggacccctggttcttcagttttgggattggactggctctctttgctcttcagcttgcggatggcctattgtaatcatgtgagttaatatttaataaatttccatatatatatctattttattagttctgtccctctagagaaccctgactaacagagaggagaggatatctgaactaagcctcagaggaggatgaatggcaaggagaagaaacatgtctccaggaaactgaggcctgagggggtagtaatttttcccgagcatatgataaatgacagtgatttgggaagacttcatggcatgaatgtatgtgagaaagtgggcttgcgagagcaagattggaggagttggttatggaaaggcgagtaaccagatataggctgatagatggagtaagcatagagaagggcattgttttgtttgcttgttttttttaattttttaaatgttttatagatatgggagtcttactacattgctcaggccggtcttgaacttctgggctcaagggattctcctgccttggcctcccaaagcactgggattacaggtgggagtcatcaggccggcttttaaagaagggcattgcagtaggaatagaatgaaaggaagagatgaatgaatggaagagatatatgagccatttcaaaataagaatcacaacagtggaactgagtggctgtggataaaagctaaaagggttaagtcagggttgggaccaacagaactagaacaatacttgtattttggcccagatgacaagggctgaagggcatccagtgaacacccagaaactgaggacgctagactgaagcccaggggaaaatccaagctagtgaggtttttctcttatgagttatgggaggagcaacttggagggaacacttattgattgcatctcttgtaatatccacagcaaaggcatatgaggcgaggctagggaaggagatagaggaggagtgtggtcagagacgcaaaaggcatcaaataaagctgatgtggaagagaaccaggacgctcattgtggtatgaaagtcaagagagagagcttcagggaggtgggggattcgcaggtttaaggagaaagcaaagagaatgaggaccaaggaaaggccattggatttgaagtttgagattttctttctttttttttgttttgtgacagagtctcactctgtcaccagcgtggagtgcaatggcaccatctcagcttattgcaacctccacctcctgcgttcaagcaattctcctgcctcagcctcccaaatagctgggactacaggtgtgtgccaccacgcccagctaatttttgtatttttagtagagatgaggtttcaccatgttggccaggctggtgtcgatctcttgacctcgtgatccacctgcctctgcctcccaaagtgctgagattacaggcgtgacccactgcacccggcctgaactttgggattctcttggtggttgtagagaatgcacttcattagctttagattctgggacagtcacattataaaagacaaggggaaataaagagggtatacaggacactggtgtatactgtccactccagatcagtggatgaagaggatctgcaccctaaggggacagcagatttatcccattgctttgttgtgttgctttgtcgagatgggagatacctgaaagcagaaggaaagcaacataggaagacgctcaaaaataatgattttcttaaatgcacatgataatttatggctgacactgacattttctcagttacctttcataataacattagagaaatgacataaggttgcagagtggggggcagtgggtttcttctgactccacttcggttcccttcatagcatgaacacatttgtaagggagaaaacgaggcaggaatgatgcacattccgagggtgggagtgaagaattaggagtcacaggtaggttagcatgtggaagagaaggtgactgaaaccagaggcagagaggagaaagtggactgagatttacatgttttactccctgaagagactagcagtccctatttccaccaagggcagaaacattcaaacattctgcatacctttccttttatgcatgaaataaaatactggcatttgaaggaagaggttgataatgtttatttcttagaacattcaagcttggcagttatgtgacttatctctagagcctctcagaagtctctggggacgcaggagtctttggagactcacactttctgcaaaagtgcagaaagaaatacaattacttaatgaatacctactgtgtactcagcaaatcctttatctgtcacttgtgttaatttctagaaattacataactaagagtctccatgaattgcacttgttttcttaagagggaaagagaaaaaaataccttctttccttaccatttaagccagtgctttttaaaccaggatctgacactccgtaggtgaccatagatgtagtatcacagatccgtctgtttccaaaatgttacattctgattttaagatcccctgaaagttgaaatttctcttttgctgcaacaactcacacttgagaaaaattttcacaggagactttattttcttaaagcagagtttgttaatatgaattctcacaggactgtggcaattcatttttcttttaatgcgttcattactctagaccaagacatcaatttttgtgcaaaccttgtttcctgctgccacctggtggaagccacataagagttttacagaggctttggtggtgctaggagaggggccagggctcttcctcagtcacagaatcccacacagtgatcaaagagcagatctttctattaaactccctggcagcaaaacagtagaggcttggctctctgccccgggactgtgcagaatgtcacaggtcggaagcccagagcatttttctcttcttttatctttagactcttgtggctctcagaccttgaatataattctttgctgaaaattctttaaaatcattatcttttctttcttccttttttctttctttcttttttctttcctcttttttgctatgctagacaggaagaaagaagggaatggcattttaatgtaaagaagattgcactgaaattatattacttgcttaattgtattaattcactgcaataacaatttaataatatgacaggtcatttacatgctaatcatttgggtctcttgtccagagaaatcatgaggaagggctgggaagtgctcttattatgatcaaaataatccacactctcctagaggagtgcataggtatagaactgacattgtttgtttaataaagtttcattcaaggcaatttggctggttcttttatcaagtgtaatgggaaaacaagccagtcctgatgttaaacactccaatgatccctcaagctttttattctgtaataagttttacagcattatgtgttacccacgacagtcatttagtcggtcaatttcaggctagtgataaaagtttgagtaatgggaaagctgtgttgatgttccatattctttgtgagatgtctatgaattaatgctcccaggtacacactcaatttatatttaacagccattactaaatgtaatatctaagtaaaacccagttatgacctatatatatggaaaactaattaaagctgttggaaacaacctatttccctttggattatttatgtaaatacatcgaggtctaaaaattcagtacaagtcagatgtgttcctgcctagggctattatataaagctcagaaaattttatgagaaaaatgatgattcttaaggattgagcttcaaatgtgaatttttctattttataaggatatagcttgggttgttaagcatcaacatagcttttcaaaatagttttttattctcacaagtttaaaggccttgtaaaatctcttctattaaatatacatatatacatacatattacatatacaccaattgactaacccctctaagtgctgtatctgaactaattttaaaagaatacccgtgtttttcagctcccaaattgaaaagattattagttagtaccgtgatttctgaacttttaatcaaattttcattcattttataattttgaaattttgacaatctgagaatcttctatgattaaatatattctttcttcctttcttttttctctttcccttccttccttccttccttccttccttccctccttccttcctgtcagtctgtcttgctctgttgcccaggctggagtgcagtggcatgaacatggcacacttcagcctcgaactcctgggtgatcctcccaccttggcctcccaagtgttgggatagcaggtgtgagccaccaagcctggccttataaccaattaaatgaaggaaatgatactatgacacagacaaccatttttcaatcaagttattctgccatattaaattttcagtcacctttctattgcatttattgaatttctactttttaccagttctaagcctagatctgtctctcttaaattattaaatgtcttattttcttatgaaacaaccttcagatgtaatacacagaagaaaaaggagtctcaggaagtttagtttgcccaactagaaattgagcacaattacttggtgtgttgagggggatttgaaactatgtccttatgataattgatagttatgataattgatgacaaaggggttttagaaagacctcttttgcttttagaaacacttctctttgcactttctttaatgcccattttttagttttatgaattaaataatatacatttatttaaacaaaagtatcaacatttctcaagtatctataggttacttatctactcaatgcaactaacaatcaaaaactagtgctccaacaaattaaattttccaaacactgaaatattgatcacaatgtctctaagcatttcattgaaataaaaattttgatgtatctaattttcctaaatattttaaatgcatttcaatatgcaaaactctcacaaaattgttgtaaatacaaaggtaatcagtatttttagattaaaatcagttataaatgtgctaatatagtgaatgtgacccttgtccggactcacatttttcttcttagtcttttcctgggttatattcttaacatatcagctatttttctatttttatagcttcttagggttcaaaaatattaccatatccaaatgaaaactaactacctgagagcagccaactgcaggatctgtgtcaggatccagctgattcttggtgaggacacagatccaggtgtctaaggagattcagacactagccagtcatcatcagattaagctgcacttaaatccacatatatcaaattgtttttttttatttttacaatggtgcgttactaccatgatgtcttcacaactgatttgagcagtgttgcaaatcccatttcattatcccatcgttgtgatatatagacttggcctgttggaataccttcttggaaatttaaaaaaatagtttattaagattattagggccattgaagaatttcctcctaggagataatgcattgagtctacctttcagtcctcctcctcagaacacgtgcccgaactatcatttttgagatcaccattgatttctttctacagcgtggtcactggtaccaataaaatgctagtcttcattcctatccagttattatgtggggccccatgttgttagtctttctgatttcattatgatactaagttttaagggaaacttgacttcctatttttgtgtctattgtactacccactatagcgactatatagtaaggaatataaatttgttttcataggaaataaaatacccacatatattaaatccccattaaacataccctatttcatttacccttctttaaattataactatctttttatatggcttatattaacttttctctctcaagcatcattttaagctaatgacctttcagactagacccaacttctttcagtcaaccataattcatgctcactttctccctctctctcatcaaatcatcgaaatttgatcagcaggaatctctttaacttgactccattgattttttagtgttttagtacagtctccaacattcttaaaaacatatttgttttctagcaataacaagatgtcccagactcattccaatttgttttgttttactgccccaaaacatggaatcagcttccctaccataagtagtaaagagtagtagagaatactattaaagtccaaaatctgggaactagggataaacaggagagttgatggtaagtaaaaccagtgctgctgcttaactatatttactaatgtcagagatggaaaatacaagttattttaatgtcataagctcacagtaattttttccaaataagattatatattgctatgctctacttttctcaaattatgtgattttattgaaaatgaaaacttttattttggaattgaaatatttgaccctcttctttctgcttaggggaattatttggaaagatttcttatgcctagttctgtagggttccaaaccatgtatactttcacaaaatgcatgtgtgcaatagcacacatgctatttccagcagcaagttgaatccttgtatctagcactgatggtcaatatgttttgcattttgctttcccacctccaatgaattagtataaactatgaccttcattgatatttctttagtttttatatttgtatgaatcagctacttcaaacccttaataaaatctacaacctctccaataaacccaaagttactagatggaaggaaacaaagattagagcagcaatcaatgaaatagaaacttaaaaacagaaaagatcaacaaaactacaagttggttttctggaaaaaaataaacaaaatcaataaaattttggctagactaagaaaaaaaaagagaagactcaaataaatgaaaccagaaatgaaagaggagacatcataacctataccacagaaatccaaaggatcacaagaaactgttatgaacaattacacagcacacattgaataagctaaaaaaagaataaattcttagtctcatagaacccaccaaaactgaatcatgatgaaacagaaaatctaaacaaaccattaatgagtgaggaaattaaatcaataaaaagcctcctatcaaagaaaatcccaagacctgatagctttactgctgaattctaccaaacatttaaaggataaaataccaattttttgcaaacttttaccaaaaaatgaagatgaagaaacattctcaaactcattttaccaggccagcattaccctgataacaaagccagaaaaagcaccacaagaaaaaaaattacatgcccatattcctaatgaatatagatgcaaaaaccctcaacaaaatactagcaaactgaattcaacagcatactaaaagaatcattcatcatggtcaggtgggatttatcccagagatgcaaggatggttcaatatacaataattaatatgatgcaccacattagcagaatgaaggacaaaacccatatgatcatctcaatagatgcagaaaagtcatttgacaaaatttaactttctttcatgaaacaaacactcagcaaattaggtacagaataaatgtatctcaacacaataaagagcacatacaacaagcccatagctgacatcatattcaattgagaaaagttgaaagctcttcctctaagattaggaagaagacaaggatgcccactcttgccatgtttattcaacatagtactagaagtactagccagaacagttaggcaagagaaagaaataaaggcatccaaattggaaaggaaaaagttaaattgtctctgtttgcagatgacatgatcttatatgtagtaaatcataaagactccatgaaaaaactgttagaactaaaaatgaattcactaaagttgtaggatacaaaatcaacatacaaaaatcaacagcatttctatatattaacatgaattatccaaaaaggaaataaagaaaacaatttcatttacaatactaaaaaagaaatacttaagaaaaatttaaccaaggaggtaaaagtttataatgaaatttataaaacattgaggaaagaaattgaagaacacaagtaagtggaaagatatcccattttcatgaatttgaagaatattgttaagaattcagtactacccaaagtgatctacagatttaacataatgcctataaaaattccaataacattttttacagcaataggaaaagtaatcctaaaattcgtatggaaccacaaaagaccctaaatagctaaagcaattttaagcaacagagagatatcacatgacctgattttaaaacctaccacaaagctatagtaataaaaacagcatagactagcataaatacagacacatataccaatggaacagaataaagaccccagaaataaattaatgcatttatggtaaataggtttttgacaaaggtgccaaaattatggggaaaggacagtctcttcaagaatgtatatccatacatagaagtgtgaaactaggctctcattttacaccatatacaaaaatcaattccaaatgaattaaagacttaaatgtgacacctgaaactgtaaagctactagaacaaaacatagggaaaatgctctatgatactggtctgggaaaagattttttggctatgaccccaaaagcacaagcagcaaaagccaaaatagacaaatggaatgacatcaaactaaaaagcttctgcacaacaaaggaaacaatccaacagactgaagagacaacctatggaatgagaggatgtattcacaaaccatacctctgataagggattagtgtccaaaaggtataaggaattcaaataattcagtagtaagaaaacaaataacttgatttaaaaatggacaaaggacctgagtagatgtttctcaaaagaaggcatacatgtgccaacaaatatatttaaaaggtttaatatcactaatcagggaaatgcaaattaaaaccataagataccacctcaaacctcttagaatggccattatcaaaatgataaaagacaacaagtgttggtgagaatgtgaagagggaaccattacacattgttggtagaaatgtaaattagtacaaccattagggtaaacagtatggaggttcctcaaaaaattaaaaatagagctaccatatgatccagcaatcccactattggctacatatccaaaggaaatgaaattagtatgtagaagagataagtgcactcctatgtttaccgcagcattattcacaatcgctaagatctggactcaagtgcccatcaacagatgaacaggtaaagaaaatatggtatatatacatgatggaagcttcaaaaagaaggaaatccagccatatggatgtacctggagaccattatgttacataaaataaactaggcacaaatcaagtatcctatgatcccacttacatgtggagggtaaaaaagttgaagtaattggaacaaagagtaaaatagtggttaccacagagactgggaggtggtgggattaggtagatcttagccaaaggacacaacatttcaattagacaaaaggagtaatttcaagagatctattgtacatcatagtgactacagctaatgacaacatattgtgtatatgaaaattgctatgagagtggattttatgtttccattacaaaaaaagataaatttttcagataacgcatgtgttaaatacctttatttagccattctacaatgtgtactgtgtatgtacatgtgtatatgtatataatctcaaaacatcatgttgtacaccatacatatatacaatttttacttgtcaatcaaatagtttttaatttttaaaaatttacaccttccttttggaataaatatcccagctctcaaagctgataagtaatgaagtaaggatgaagctacctgatttggctgatgtatggtccagagaaggcgatgcatatgggacaaaatcatgaattaaaaaggcaatttttctttagattaaaaaatgtcaacaaatagcaatgtttgttattctaaggaaaaattatttatgatacatgaaaacataaagaacatccaaagctgagaagtattctttcttcattctttttatagtcttcatcttaagtgacttcaatacataccatttatcagcatgtctgttacatcttatattgaactgtttccatggaacatctccatgggtcagactgtagcctcaaagatactacaagcaaaagagaatccagcagtgtagtgggagaaggaggaaaaccttccctgactgcttggaaattgatgtatttatgacatgaagaagttaaaagactaggccaagaggcacaggatccagataaaacaacttccctcgggttccagagacatgaaaataaagaatttatagttatcaggaaggaggtaatttgctgaaattcccatcacagatccaaaaacgaggaaggaggcagacatgtgttaatagctccgaagtggcctggaagtcttattttgccagtgatttaactgaagatcaaatacactcatgtaaggaaagcagagaaagcttgcataagtctctggcctggacctggaaacccagtctgctttatttccttgggggagcaggtttcctaattcttccacgacatttgttggttaaatgttgaccaacaaaagcagaatgttacattgtgtttgatgggaggggaaagtccttgttttctatctagtctggggaatcatacatcaatccacacaggaatatgcatcaagtgtttccatcttaatgagtggcatgattccagaagggcaacaggccaggagagctctaaagcttccctgaaaaaatggagaggctggttgtgttttgttcttgccttggatggatgaagaaatggaagcaggtgccccattgggaccatggatcaaatgcacttaggaacttaaaggaaagtctaggggctctgagtgaaccagcacctcctgccctgctgggggttagaggcttcactggctagtccgaagcctagtggttttgagtaagaaaagaacttcaaaacattttactgtgatttaaaaatcctccatggtgagcatgcccagcttttgttctctcgatgtacctccaatctctcaagaagacataatttagtaacgctggggttgctgctactataaatgctttgattaacattagaggaagaggacgacagaaagcagcttctgtcccagccaattaaagagcttgtttaaagtatgaaaatgatttattagacatgcaaagagggttgcaaagaagaaagacacacagtctcaatttaaaaaaaaaaaaaaaaaaaacaaccacaaagctttggtccaggtgcctgccttctgacaacacagataaacagtttagttgataatcccccacatcttcttcttcagcacagcaatttgttccagttatcatactttctaaatagaataaaagaaaatgatgctcctttataatatatatagggtttagataaaaataaatagcacagtccacatgctttaaaccaaagattgagtctgtgtgaacagaaataccagatagctgtttgatacagcatttcccaaatagatatatctgagagctctgctaaaaaaaaaaaaaattaaatttttttaaaaaggaaagctagaaaaaataataataaatagagccttgtgatcatatatgtgcatcaacaccggctatatactcctttcggaaaatcacaatgtacgtgactcttgcagtaaagaaatgtgtttaacatttttacatttttaatacagcatttctcatacatatttgactgtagaaaccttctctgatatgacgactattgtcattccctagaattagtattctgttcaacatacttggaaaatacttaactagccaatctatttacaatgggaagagctataaagtccctcagtcattaacagctaatacacttgaaagattgttagcagaaaaaggaaaacatgacgtcaggaagctggggccatggattttgtcccttacacataccttcgttttacagacatcacaatgacaaattcaccctgacccaactgaggtcacatcagcaactgaatgtaggtggattgtctgaaacccattaccgttgtccacccaccatcatagaaaattattttaaatgtatgtattatagtaagagtactcttgatagtattattttttctttctttcttttgagagagagtctcactctgtcacccaggctggggtgcagtggtacaatcacagctcactgcagcctcaacctcgcaggctcaacctcccaagatgctgtaactacaggccagtgccaccgtacctggctgattttttgtattttttgtagagacaggatttcgcaatgttgcccaggctggtctcaaactcctgagctcaagcgatctgcctgccttggcctcccaaagtgctgggattgcaggtgtaagccaccacacccagtggctaatattacttaaaccatataaaactaggcagtggagaaagggagtaagagtacaggctccagattcagacggactttctctgaagtccctcctactgcccatggggacttgaacaagttacttaatttctctataagcctcaatggcttcatctgcaaaggagaataatgacagcatctattttttaatgttttgtgaaacatatggaataatgcatagtaagtgcatagcacagtaaatgacacatattaaacatagacaaatattagctgtaatattttatcatcattttctttacaaataatagtgtttttggtaactaagactaagaagaaaagaaggaagacagaagttgaatgtccttgcagatggggggcaaatctgctggcaagatttgtgatgtgtgttgctaattatctgtgattaactggttaatagattagttaaatcatcctgttggctctgcggaggatgatctggaaggggtggtactagagtcagggagacaaaagcagtgggaaaagataacagaggatgactggagagactttggagctggaattgacagaatttggcacctgattttgcatgggcatgagatttctggcttagaagagaccctgaagtttcataatatggacggtgatattactaagatgaagaccacaagagaagccactcttggctgagcgcaatgagtttggttttagacttgctcttgcaagcttctggtaggaaatcttaatagttaagcacgttctgatagaattttggcacttggctctaggaaggaccctgattagacatagatggagctatcaatgggaagatagttgagatcacatagataaatgatacacagagagaagagcacagtggcatagtggagctcagaggaatgtaaatatttaagagataataagaggcagtggaaccaatgaaatgatgaaccgagagtaaagtagaaagatgatgagagagaataacgtcctgaaagttaaatgagcttgagtcaacaagcacagaaatcagggctacaggctacatgccaagcctctgaacttcctccgtcctggaccatggaccaagctcagtcctgttttccccagagacccacagaaacgccagtttgcctcctagtgtaaccctgcaaagaaagcaatgtcgttctgcatcaatgctgatgagcctgcgctgttcagtatctgtggggcttgccaagctactcctgctcatggaaacctcagtcaggagcgaggattccttggcagatcgtccctgtgttctctgcatgaggtctctgatctggctgcaccaataacaagaactaatgtcatgtttacccttcacaaagttcaaaataacggtacttcgaaattagccaggcttctaataagcagtctgagaagtacacagactccaaaacagtgtttgcagagcttctgtagaaaagatcatctgcatcagaggcagctgagatcctaatgaaaaagaactgcaagactgagtgattggaaatagctagggttatggctcagcaagctgccttttcagcaagccttgcagatgattctgatgctcaccaaagtttgtgagccactgatgactacagaaatagaatatcaggctgaaacacacaaaaagagcaccatcggggaaaaataatatgaagaaaatactacatttttagtcctggtccctaatccttcaaagagttgttatgctttgtggaaactaatcaggtctagtctcccacctttcaaattatttctgttaaaatgttctcccctcctgcccagaattttctaatacacagtggaatgctttattgctctctttaagcatgtcaactagagcaggagaaaagtttcccatgtattttcttcaaagaaaaagatgtttaaagtttaatattaaaagaaagagtcatgaagtagtttaacatttttttcacagggcgcagagagttgcttctgcatggttatttttactaagtactttccaatttatactttatttttctcaagtataaaaatggatcttcctacttaaaaacaccaatgtccaacttcatggtcaaatgtaaactttggaaattattacttgatttctgttagtggaggaattagaagagtttttgttccactatgttattccaacctcatctcctcgtttgtcaagattcttaagctgaacgtttttctgcgtgcatgcatgcatgtgtgtgtgtgtgtgtgtgtgtgtgtgtgtgtgtggtcacagtgaaacatagattaaggctgagaagtaacaaccagctaattattataagtatagatataggccatggatattaaagtacccccattttgtgttgatacatgaaatcatagaaatttcatgtatcatagagattaatcacatagagattaatttagaccataaaaacatttcaattttcaggaatcccttattaaaataatttttgaaaaaacaggggtgaatattcatgaagccaccacgtcataaaggtttggttgatgaatagtgagagtaggggtgaatagaggtaaagcaggagacacattggcaaggtcagggctgcaagagacaggagagcatcgaaaccaaaccccaccttcccacactcctaaagactgtccagtgagtaattttcccatttatacaagagcctggtctatgaaggcaaataaaatggaaggatttaccctcactgggcattgaagcacaaaccttgcccaaggccctgtcccgagcaaaagagcttccctactgggaaagatcaagatcttaatatcccttaatataactcaaataatcattagccaacctgagagaagaggacaggctctgagtctgaggagaagggttggaagggtctggttagtgcctgaccttcctataatataaagctacttggagatattagagctagtgaatgccttctcccagccaaatccatgctccaggaatgggcacagagttgcaaactaaagatcaattgttcatcgtggtacatgtctttgtgaggtattatgggacaaacttcagttcatatgggaaaaccgaacccttcccacgtggtccgtgaaaacccagttgcacattttcagacaacttctttatgagtacagggcattaggaagttgaaccagcccggccaatttagaacaactggtctctttaacatgagcattccccgtcagtgctaccaaactcctttccatgtgtcccatgcaaccagaaaatgtgttgtttaaattcagctcgtgtcatttgtaaaaaaaaaaaaaaaaaaaaaaccataaaaaataaaaataaaaataaaaaaattaaatagtttgacaagataaatcagggactttggaataaagagttagtaatatgttgagtagtttgtcacatgatatcatttttaagctactcttttttgggggggcggggcacggagtcttgctctgtcgcccaggctggagtgcagtggcgcgatcttggctcactgcaagctctgcctcccgggttcacaccaatctcctgcctcagcctcctgagtagctggaagctactctttctaaataacttcaacaaatattactgatgtgataacaaggcttgatttcatcaagcagtaactctgtctccatgtggatagcggtcttttgaagccctcctcggctgttagagtgcataacccacagctctcaaactggtggagacaaggtggtatgtttgactaattcagtgacgttcggtaagcacctactatgtgcccagcaaggtgtcaaaaacagagcaaagaacaaaataggcaaagtgattgtatatatcactttttatcctaggtcaggataagcaagcagtacataaatttttaaaacaggtattttaggtagtgatacatgctataaaaattacatggatagagaatgaccaaagatgactagattgaatttaccacttctttgagtaggtggcagtggttcaagttggtgactgagttctaaacgatgggaaaaagacagccctgcagtggtatgtgggaagtgttctgggcagaaaacatgttctgaagctggaacaagcttggtactttaaagaaaagaggctgggcgcagtggctcacgcctgtagtcccagcactttgggaggctgaggagggcagatcatgaggtcaggagatcgagaccatcctggcaaacatggtgaaaccccacctctactaaaaatacaaaaattagctgagtgtggtggcacacgcctgtagtcccagctactcgggaggctgaggcaggagaatcgcttgaatccaggaggcagaggttgctttgagccaagatcacgccactgcactccagcttggtgacagagcgagactctgtctcagaaaaaaaaaaaaaaaaaaaaaaaaagcatgcttgtgtgactggagcctaataagcaagtgagagaatagaattggatgatttcagaggcagagacaaaatataaggaggtcctagctgggcacagtggtgtgcatcatagttccagcaactcaggaggctgagcaaggaggatcacttgagcccaggagtttgagtccagcctaggtaagatagaccccatctctttaaaaaaattttttaaattttcattaaaataaatataaggtctttacgtgctatgtattccatgaagtccagagctatgaatgccatagagtaggttctcagtaaacatatgagacaaaatatggctgagggtgaccttagatcaggctttctgaatcttacagaaaaatcttcttttgaatctcttttagctgaactttgaagagaaggataaagtagcatctgtttcaggtgccagggaagcccagaataaaaggctcaggatgacacagccgcatcaacatccagtgtttattggccatctgtcccctaggaatgtcttaagagctcatgctctatttacgagaacagccggggacagtgagaggaaggaagaaattgctttataaaaaagagtagctgcattcttttgtgtgtggaaagagcactattgtggaagcgacgaaacccaggtgtgtaaaaatagaaccgagtgttcacattaaactttccgtgcctcagtttccccacatgaaaagtggacataataacagcacttgagtgagaattaattgagataaaacctgtgttgaaatactgcttagaacatgggaagggtctgagctactatttattaataatgccattatcatagattttagctacatttattaataactccatgaatttagaatgttaatggaataaggattggagaagaaaaatttgctatggccagtgagaattccttgcaagaaaaaagcattgcaattgtgtgtgtgtgtgtgtgtgtgtgtgtgtgtgtgtgtgttggatatgggcagttgtagtgtggaacacctcagcagcacccaggcctcacttgtggatggtacaacctcaggaaacttactcttcctcagtataaatgagaaggtccccttttcccccaatggctgcagtgttggtctaggatgaggtcttctctaccctcatctgcgtagttccaggatggactttctcctcaaaatcacagtccaataaacaaaagtaatgaaaagggtctaacttccgtttgtatctcatgaggagcatcaaaaaccagttagttcctagcatagcacacagcactcttgaattctttcagccattcccagggccctcgcttctctaccctgcccctcccatccctgtcaggtcctgagctcctccttgctcctccctccttttttttttttggttttttttttttttttttttttgagacggagtctcactctgtcacccagacttgagtgcaatgtcacagtcttgggtcactgcaacctctgcctcctgggtttaagcaattctctgcctcagccttctgaatagctgggattacagacatatgccaccatgcctggctaatttttgtatttttagtagagacggggtttcaccatcttggccaggctggtcttgaactccttccctcatgatccactcgcctcagcctcccaaagtgctgggattacaggtgtgagacaccgcgcccggccacgctcctccctcttttgaagacttgttggactcttgtctttccttctccttcctctttccttttccttttgttctgtctaaactcctacagaacaaataaatcaatgaacgaaacacctaggtccttcccagtgtgaatcctttccattaccatccacaaaggtgaccaccattaaagctgtgtgtgaaggcttctagacattagtcctttattctgagtttaagcaaatacacacacatacagatgcatgtatgcatatgcgtgtatgtgcatattatatatgtggggtatatacacatatctttgtatcaggcacataaacaatgcacacatacttaataggtttgtgcaaaaaaactgcaattacttttgcaccaacctaatattactataataaaatggagctgtgatatacattttattctgaaaatagcttgtcccttaacaacatacaatggacaatttacatagatcgattttatggtttatgccacattatgtcacattttttgtccaaatgaatgcatgtttcttcaaatacatacagtaataaatgtatacattgtggttacttccattttttgctatttgaaactctttataaacatttatatacccaaaggattataaatcatgctgctataaagacacatgcacacgtatgtttatagcggcactattcacaacagcaaagacttggaaccaacctaaatgtccaacaatgatagactggattaagaaaatgtggcacatatacaccatggaatactatgcagtcataaaaaatgaagagttcatgtcctttgtagggacatggatgaaactggaaaccatcattctcagcaaactattgcaaggactaaaaaccaaacaccaccgcatgttctcactcataggtgggaattgaacaatgagaacacatggacacaggaaagggaacatcacacaccggggactgttgtggggtggggggaggggggagggatagcattaggagtaatacctaatgctaaatgacgagttcatgggtgcagcacaccagcatggcacatgtatacatatgtaactaacctgaacattgtacacatgtactctaaaacttgaagtattataataataaaattaaaaaacaaacaaacaaatcactcacaccatggaagcacaaaactaaaaagttcagtgtgtgtgtgtgtgtgtgtgtgtgtgtgtgtgtgtgtgtgtggtgttctacttgaggtagaaggtaaaagattaaggagaaaaccaagtggattgaaatctgcaataaagcgaccattctccagtactaaatgcacttgaaatttattcccctgcatctgtaggtaaatgtccttctgttcttgaaacaataaatccccataaacttcccataaagttctgcagaagtgaaatgtgagattggttcccttggaatccattcagtgctttgtttgtgcatcttccaatcttaattttagagcccttgttcttcgtccagagcccctagactgggaaaaggtcagaatgcaacatgtttcaaagctgctgtgctctgggtggctgtcagactgttggagagaattgctttcaaaacccagagtatgccaccatctactcagtttcagattagcgtaacccacagcaccatgctatggcaggggaagctataatctttgctttttgttatcatttaaattcacttttaaaaatattaagattctcaaacagccagattctgaacatgcagtcttccccattgctatcaattatgtctaaggcaaaaaaagaggaccaaaacttctattttttctaacttttattttaggttcaggggtacaggtgcaggtttgttatatagttaaactcgtgtgacggggggttgttgtacagattattttgtcacccaggtactaagcctaatacccaatagttattttttctgctcctctcccttcttccagcctccaccctcaagtaggcccctgggtctgttgtttccttctttgtgtccctgtgttctcatcatttaactcccacttataagtgagaacatgtggtatttgattttctgtgtcagtttgctggggatgatggccttcagccccatgcatgttccctcaaaagacatgatctcattcttttttatggctgcatagtattccatggtgtatatgtaccacattttctttatccagtctgctactgatggacatttaggttgattccatgtcattgctgttgtgaatagtcctgtgatgcacatttgtgtgcaggtgtctttataatacaaagatttctacgcctttggatatatacccagtaatgggattgctgggttgaatgcaaaacctcaattttacaacttgaaatattgaagcgggaaatgtaagtgaaatcccaaattggcatgccatactaaatgttattgtaataacttatttaatatttgattatccaagcacgtacttttgtaccacattctgctcaataaatgtagaaggaagtgccgccattttggattgcagcagtacctcttcgtgcagtgaaaatcttttatgttgtggcccagccagaccctcagtgcagtttgcatatagctttggggcctgtagtgctgtggtaaccattgttgaaccccaaatatccaagacaggtctcagtcaatttaggaagtttattttgccaaagttaaggttgcgggcccatgacacagcctcaggaggtcctgatgacatgtgcccaaggtggtcagggcatagcttggttttatacattttagggagacatgagacatcaatcaacatatgtaagatatacattggttctgtccagaaaggcaggacaactcgaaatggggagggggcttccaggtcataggtaggtaagagacaaatgcttgcattcttttgagtttctgattagcctttccaaaggaggcaaacaggtatgcgtttatctcagtgagcagaggagtgattttgagttgtgtctgtcctttgtccacaaggatattccttgtgagggaggtatgtagctttttttttttttttatcttagtagctatcgtttttaggaatacagtggaggcaggtttgccctaagcagtacccagcttgacttttccctttggcttagtaattttgggggtctcctttcacatcatccacgcagcagcaacttctggtgaacacactgttcattattccaggcaccacttatgcagtctgtctttccctgatacaaattctcagatttctttgaaattaaaactgttctaaatctgcatactggatattacttcattcacattatatttattttaattatgtaacacaaagttgtaaaacttctgttagtcttaatatagactcatatatgtcctgtgtcatcaatgtgaattccattttcaatcctcacctcaggatgattacgagcaaagcacagtgtgtctaagctccaatgcttcacactaaaaacagcaacaaaggccaccagttgcaaaacagaatcgttctcgctctcagatgtgttctttttatccttaaaatcagagcattcatttccgtttggatgcactatttatttttatatcagaaattattttcacttagcagttgaatggaatttgtttgcaggctttctttcaatagtatttccttcttcttgaggatatatgaattctaaggaaactgcagcacattttgtaaaaatccaaaccaattatctcacccctgcctacaaagaagtctttgttatttttctattattattaaaatatatcagcaagattttttggcctttatagttctttggtatttcaaaatgcttctgtatgatgttattgctttaaatcatcacaaaccctgtgaagaaagaattatttttctaatttacaaataaagaaactgaggtcttagaagactgaattcatttcctcgtctctctttctttgcactatgggttatcttgatgctttactgatcctgctctcccctgagacatgtggactctgttactgttttcagcaggaaaatcatggttctattaataggacatgtgaatctttttatttcctgtaatgaaaagagcacaaaaaggaaactttgatttgtgtaacgtaatcgtatggatcatatcaacccattaccctgggtatagagcagtttcccagtttcacatccgtcattctgctgaaatgggtggcttttttccacattttactcacctgatggatttgatataaaacctgtttttctatggatgtgaggctctggaggttttgtagtctatcaacacataaaggctgcctggcattacagcactcctgctctgcacagtggtggagtgtagctaaatgcagctcagtctttttacagctcagctatgaccatccttcattacaacagggcagatgataaaatggaaacttaatgctattagatcatgaattccaattatatgaagagagatggaggtaagagaaattagatgccaaaaggagatacaataaagacagaagtgacgttcacagggctggcagttctcagaaccattgtcacccatcattgtcagtaccacctgaggacccggtgaagatgactagcatatcagatatctgagaagggaaatgctgagtgtgtccaaacatccaaacaaataatgccaaacctagaaaagcttctgtccatatgggttaaatagctcttcaattctgaaactgtcaaaagtaggctttgcagatggtcatgtcaagcaatgataataactggtagtggaattcccatggttcaaatttattaaaaaaaacacactattttcatttattcaagaaacacatattgaatacctgtgtgtcaagctagatattacagttagaaatatatagaaagcacaatctctgctctctgaaatttgcagcctagcagaggagaggaacacatgaaagtaattataataacaagttagatgcaatgatagatacaagatatcctaggaggacagggaaatagtaccatgcccagtccggggatacgtcagaaagactgtctggaggaggtggcatctgaactgagtcttaaagaatgagtagaaatcaagtccaatgtggtatatgaactgagagagagaaggggaggatgttgtagaaaaagacaatccaaaaagaggaaacagtgcaaataaagctggaatccacacacaccattgtcatggtgggaacaatggtagctgcatgttgctgaaatatacattctgaggctaggagtagaaagagataaggctggcaaagcaggcctatgcttactatgccatgtcaccgagcttgcaatactatatattctgcaagctatttggaaccgttgggatttgatgcatgagagtgaaatggtcggttttgcattttattttattttttattttttttttttatttttttgtgatggagtcttgctctgttgcccaggctggagcgcaatggcacactcttggctcaccacaacctccacctcccaggttcaagtgattctcctgcctcatctcccaagtagctgggactacaggcacctgccaccacactcagctaatttttgtatttttagtagagacagggtttcaccatgttggccaggctcgtcttgaactcctgacctcaggtgatccacccacctcggcctcccaaagtgctgggattacaggcatgtgccaccatgcccggccttgttttgcattttagatggatttctctgttggctttatcaaggatgaatttgagatgagcagcagcaggaacagaaccaagttaggaggctgctgccacatccaggcaagagacaatgcagagccaaggcagcagaaggaatggagaggaggagacacagcacagactatttagaaggtgtggctatcaggccttggggattgactggatgctaaggaagggctcccaggttcctgccttgaatggcagagtgggaaaagctctaccttctgagatggagaatactgtggatatagttaatttggaagaaaaatgcttgctttcagatatttagagttagatctctactatgagtttaaggctaaaataggcatttcttactggacagctttaccttgatgatttatactgaagatctaacttatgcacaaatttgggaatcgttaacatatgattagtacttgaaatcatgaaatgggtgaaaattactcaggaaaagaaaaaaagcataaatattcatccctgggacacaggaacattttgaagttgtcattccccagagtcacccccacccccatggcacttcagtgtactgcacactttgagatatatatatatatatatatatatatacatatttttttttcctaataaatagagacgaggtctcactatgtcgcccaggctggtctcaaactcctgggctcaagcaatccaccggcttcagcctcccaaagtgctgggattatagacctgagccactatggccagcctgatagtctactccttaacctacaggaagcagacatcaatttgttttacaacctctacatgcaaaaaatactacatagtcttatttttactaaatcaaaactttgtttcttgctaaatcttcttcccctctttgccagggtgtaaaagattcagtcttgttattccccgctttctggaatcaatcacatagcaacctttagggcttacccaggacagaaattggagtgaggacaggaaggccacaagttcccatgacacacctagctattcacgtctccgcttctagttattaactttgagccccggtagacctaggattactcaggcataaataatagccccccaaatgaaaagtgggaaattgtagagccctaatgtggagagcctgaagagcttcataaaaaaatcttagacttgttcccaccctccaaacatgtgaaacacacaactgtttcaaacattttaaatgtaccgaaattacctcataagtaccctttatatttaaatgcactaataatgggattgacatgtaagaatttccatgactaggaacaagcccgttttaccacaagccccagaacctggctataggtcagctcacagcagtgcaggaagcacctcaactgctttcaccagcatattctttttctctgtgggaccccatccccattctagcccaaaggacccgaatcacagagacacacagggtgaaatatttatgttgttgactcctcccgcaaacttgtcctctgatcattttgtgttgcagccgtgaaacaggcttgctggacgggaagaaatgctgcagagagagtggctgactcaaacccatggacagcattttattaataacttgcagcccttcattctaagtgaagcttgcccaataaaatgaggcctagagctgaacaaagctcctcttacctaacctgaatgtacaaaaaaggtttaattaaggaagtaatttttttctcccgtaaggaaatcttgacaaatagactcaaatttgcatgcaaatgaagccatctggttgattgttgtccacagtccccagctcacaggaaacaatagaaggccctttgcataactcagagaatctgcaaatctctaacatttgggtcactaataattttcagagtaattagtctcttcagagctgctatttacattggaaggtgtttgccatttacagcagaagctatagatattcttctaggtgcagccccagtgtgagccatttggtgacctgaggaaatcactcaatctgggaggggaatgacaagaccattggccactggagccagcctggcagcgacactcctcaccaaactgcagcccagagtgccttcacgcagtcttctccatgcgagccaaacgcagactcttctagccaccatctcttcccccttcctaattccccatctcccctctggggagggaggagacagggcaggggcaggcacaccaggcagggcctctacttctcatcacctgtctctgctactctgcagttatctcccgtaaacatttgttcaaatgcaatcatgtccattgcttgggtaactctaccttcttagtcgtcaggtccctcctcctttcatcagatttttacttaatggctactctacaaagcgtaacacagggctggtgctcaaggatgatagctctgattcatgtgtcctgaatggaattaccaaaaaattaaaaaaaaaaaaatcagtggagatgaagagatagggagtacagagttttggaagctagtgagggagcagaggaaggaaagagatgacgaggacaaaagggcagacatgggtgaggttgagaggagtaaaccagctgaggaagtgaccgctgcaggcttagctgtcaatcctggggtttgctgctccccgtggttggaactggaggacataatgctctgtgaaataagccaggcaccgaaaacaaatactgcaagctctcatgcatgagtggaatctaaaacaacagactcagagaagcagagaggaagatggtgggtacagaggctggaaggtgcagggaatggggagatggtcaaagagtgcagttaggaggaacatgcttggttggttaagttgtattgcacagcttggtgaatgtagttagtaatagaatatgtatatttcacaattgctaaggatgaatttcaaatgttcttatcccccaaaatgttaagtatttgaggtgatggatatgttaagtaccttgatttaattatttcacttcatattcataaatcataacatcactttgtaccccatgaatttatacaattatacattgtcaatttatgatttctaaaaaagcattagtacctgtggtaaatcaggctcaggggaaaagcctcagggtttgtcgtcttactgttcacacattgaaggaaaagaggctcctcttccatctttccccattccttggccaagcccttgcacaggctgactgtaagtgaaattaaagaatatcagtgtagtagtaagtaatcacatttgttgatcttttgttttgtgcctagcactctgctaaatgtatttcatgggttatctcctgagattcttaccataccctataaaagaggttccactgttattctgttcctggaccaaatagggtcgagctgcttattctcaccacccaataagagatgcagatgaactgggaaagaagagaggtgttttgttttgttttgttttgttttgttttgttttgttttgttttgtttgagatggagtttcgctcttgttgcccaggctggagtacaatggtgcgatctcggctcaccgcaacctccgcttcccaggttcaagtgattctcctgcctcagcctcccaagtagctgggattacaggcatgcaccatcatgcctggctaactttgtatttttagtagagacagggtttctccatgttggtcaggctggtttcaaactcccgacctcaggtgatctgcccgccttggcctcccaaagtgctgggattacaggcgttgagattctatttctgtaactgggtacagggagaacacctggaaattatcgccagatcaactcaaacttacaaagttttccagagcttacataccttgtaagctatatgtctatgagtaagtgtgcatttatctaaagacataagtgactcacttcttttaatttataactaagatctgagtcctgaagaccttcctctggagcctcagtaaatttacttaatctaaatgggttcagatgctggactaatgacccttgtctcctgctaaatcatggaggtttggggagttccttcagacccccattaaacttgtttgtggaggcctggggagtttcttcagacccccaatgaaacttgtttaatcctaaacaggtcctgttaagaattccttcattatcttgccatgtttcaaggtccagaaaaggcctaggcaaactctcggtgggcttttgttacatcctaacctttgtataagggcactgcttctttcagcttttaatatttaacttaaccattcagtcagtgctgaaacagttgttatggaggcctgcattagtaagacctggtctgccacaattccactgtacacatgaggatttaggaaggccaaatgatctgcctcacgttgcccagtaggtggagatggtagagccagaatgggaacctggaggtcggcttcctcagcctgcacacggaaacagtgcagggaagcttcaccaggtgacagcccagagcagcccagggactcacttcctgtcatcactcccaccccccaccacctcatcctggtagtaccacccgcgccaatgcttctagggctcttgctggacccacaggtggactgtgacttcagtctgttacctccttctcttcattctccacgaaagaacttcagcacatcacaagttcagttacttcactactggcagtaaaggaaaatctgtaagtccaggctgttgacaggcaggtgggaagcaagctgtggagctccaagaggcccaggaaccggaggcaggcaagggccgggctcagagccggaggaatggcggaacgtctatgtgagggtcagtcacaccccagctccccgctatgaccctgccagtgactgtcctactctacccatgcaggaagtgggggttcacactccagacaccaggcaccaaaaaatgggggtaaagctccttaataaaaacagaggaaattgacttaataaggttgacccctctccttagccttcttcctgtcagcttcccaagcactgagcaacagacatatattcctcatgaggaaagtagcggattcttctctcaagatattgaacattcagtgaccaaaacaagtcacagatactgacattcggagtcccttcaatgggacaggggactctccatgtgatcatgaagcccaaacatcaaatccaccaccatcccagacacacacactccagattgcagtcagctgtctagtacttgactgttcggtataaacagacaggtgagagtcaccaactatgtaggataatgtcagagatgtcataaaagaagggacccccaaactcacaatccagggtaggggtgggtggcaggaggtctgggaagaaacagaggcgacagagaaagcagaagaaaacttttgataattaaattaatattctcagagagacaagagaagatattgagatattgcctccaaaaaaattagaatggggtgctatgaaaaaggggactatcagagaacgagaaataatacttggaaatttaaaatatgatagctgaaattaaaacacaatgacagtattgaaaataaagctgaggaaatttccaaagaagtagaacacaaaggaaaaagatcaaaatgtggaacaaaattagaaaaaaaaaaatctaaaataaataggtgtttgagaaaagggatcagagaaattattaaagtctcagacctcatatgggagaaaaatctatatcaaggcaatcatgaagttccaattaaaagagttaaagaaaagatcctgaaagtttccagaaaggaaaaaaatgtaggttgcatataaggcttcgtaaacagaaagcagttgctttcccggtagcagccctgacagcctgacaattttctttctggagtttctcaattaagtgcgaaagtagaataatgactcatcagaggaacatgggtttagaaagttaacctcgagtatctcttttctcaaggagctacctgagaatgtgtttcaggaaaatgagagtgtagacctaggaagtggatgtcatgagatcctgaaacttggggatgtaataccaaagtgtggcaaaaggaagtccctgcactaatggcagagggaggtcccaggacaagggctgtgcaggaaccctgagaagaccccgtccaggtgggaacagaggaaagagagccatagaagatgcctccaggggacaaaaacgtgactgcagatggcctgatgtgtgcaatgttggaaaatgtttgagaagagttttactgctgtgttagagaatctggagagaattcgtggcagatacatagaaaaataagcaaatgaaaaaaataattatggattttaaagaaactaaatacaagaaaatacaattgcaacaaacaaaaatataagaaaatacaattacatacaacaaaatgcaagaaaatacaatttaaagaaaatacaagtagattttattggttggcttttaaataatattacatagtcctaaaatatgaatactgtgctaaattttagtattattattattattattattattattatagtgtcttactgttgcccaggttgaaatgcagtgacatgatcacaattcactgcaacctcgaactcctgagcacaagggatcctcctgcttcagccacccaagtagctagaactacacagctattttttttcagagacaggatctcactgtgttgcccaggctggtcttgaactcctggcctcaagcaatcctcccacttcagcctccccagtcactgcaattacaggtgtgaggcaccatgccaagcttgaatttcaatataaccaaaaatctgtgatttagctatttggggagaatatagagaaaggggctggggaagcaggcttataaaagtgctaaattctcatcttatattcaggaaaatcagtagagaatatctaaaaggtataaatcaataagtagctccagaggtttttttttttaaaaaaaaatacagctgtttaattgaaagagttaaaagtgtgagaaggtgtctctaaggaattgggaaggggcgggaagcagggaactgctttttgctttagtcctagcaccactagacttttataactatgtacatgtaatactttgttagaaacaaaaattaggttgaaaatgaaatgctgtccatcagaaaatgtgctcagaaagcttgaagttggaatcctatactatcttagtctgttcttgcactgctgtaaaaaaatacctgagactgggtaatttataaagaaaagaggtttaattggttcacagttcccgcaggctgtacaggaagcatgatgctggcatctgctccgcttcttgggaggcctcaggaaacttacaatcatggcagaaggcaaaggggatgtacacataccccgtggatggagcaggagcaagagagagaagggaaggtgctgcacactttaaacaaccacatctcataagcactcaatcactatcacaaagacagcaccaagggcaatggtgctaaactattcatgagaaaccgcccccaggatccaatcacctcccaccaggccccacaacattgggggttacaattagacatgagatttgggtgggaacacagatttaaaccatatccaataccaaataatcactggtcggattcaagtaagtggctgctatgaaatttgtgtgaagatatgatagtgcattttctattgatgcttaattggggtttaaaatgatgtgatgatggagaccagcaagcctgctttgcaggctcagccccgctctcctgcactagctagaggtgcctccctggttcctcttgccacacgtgatgagccctggccttgcctaacatgcagtcacaaagcttctcatgtgattgactcacttccaagctgcagagccttcagtgtcatctcgatcattctgtaaagcttttgactccagccccgggctgggtctccagtccctctctacctgcctcattattctgttactgttgactgacccttccagtctcagacactaatttctgttctgtctcacatctttcatatcttccctctcagtttccagccttgcctcctccacttatccgtgctggcctggtccctgccacctcctttggcactctctttgccatatagtgaatctcttattcccagcttggcattctcacccattgtcactttacctccatagcactgaccttggtagcaagtacaaattgcagtgatttcaataaccttaaggttatgataccatcagtcttgcaaatgcatggtattgttcaatgaagtctatagggagttatagaaataaagccatggataaggagaattatggtgtgctagtggaagcagtatccagttatcagtaggtgctaaagcagcattagtttttatttatatttatttagcatctttaacacccaggttaccaaaaagaacattctgtctcatgaggactttgtaaaaggagtgaaaatggatataaatgagaggggcaatgagttacttatgtattgattgaataattatttatgaatggtgactatattctgaggctgaagattactgagaggaaatgttttcatgccggctttcatggagtctatgatcagttgggagcagtatcaacaaacaataataactctttgcatccagaagcgctatcagcactggaaaaggcacgcatataatcttgttataataaaaaaatcccagagattgggcaacagattcctcagaacaggactcagagatggtgaccatgggctggagcagaagcatccatgatttattatttgtaccacactcactgaaagcctgtaagtccacatcccattaagcatgtttacttacaaatcccatccatgtgccactgcatttatatagtgtacattataaagtataactaaaatcgatattaaaggataacatttttaaaataagtaaaagcagaagttctaacatcatctgcctgagccccagtgatcacccttggcacctcctgagccgcactcctactttgataccatcagtctaatccagagtggagtcctccctgttgcttctgaagaatctggatttaataagctcatccagagatttgagataactcacaattgacaactccaagggcatcatgtgataatccagatgtttccaggatagtgggaaaaaccatttgtacaaggcatgacttccccgtgaatgagtctattcaagagatcaaattagattgaagttgcttagtgagcatagaattagaataaatggaattgtggtctatagagatatttcatcacacttgaataactgatggaactacttttctcctctctgcggatatttctgtctgaataaccagtgctgggcctcaaataaatactgacatgttttacttttagctttcctttttctagaatcattttagacaactgcccttctgttaatacatcaccacctcagaaaataagaaggtacttgattggattgaaattttaaaatgttaattgcattcgtatcctggggatacagcctaaagagacagaattgctttgcttaaggctgaagtctggctggggactttgatctctgcaggctctcgggtccttaaagggctctcacccaattaggatgagctgaatccttctggccctgggcctcatctttattccctcccagcttcaggactctctgatgagcgagagcgtagatttaggttttctcacagaggtgcacctgaacgcctcttgctgtgtagtaaggcagatgttgaggggggaggaaggcttacccttgataactagcaacttgagctttgcaaagcgcctttctgttcctgttaccagtagcctacactacatcatacaatattctcctccccaagaagaaagcaacctatttgcctattttctcctactgaaatctatgattttatactttgtttaaaaaaaaaatagcagccgagcatggtggctcatgcctgtaatcgcagcactttgggaggctgaggcaggtggatcacttgaggtcaggagttcgagaccagcctgaccaatatggtgaaaccccgtctctactaaaaatacaaaaattagcctggcatggtggtgtgtgcctgtaatcccagctactcaggaggctgagacaggagaatcgcttgcacctgggagggggaggttgcagtgagcctagatcgtgccactgcactccatcctgggccacagagcgagactctgtctaaaaaaaaaaaaaaagaagaagcttaagactgcactaagattaggaacacattaagaacagtttttaccctaatgaagatatttacaaacatattttgcactagttccctgtttatgtattacctgcgacagtaattaataggaatgccattggctgagacagcttcagagccctagatacctagggaagcaagccaaatcctcttcaatgtaaatactgaaacgaaactaagcttatcagcaatcagaaaccaccacctaacctctaactaaagactttccacattaaccaatcaaacggtttctttgtcttgcatccacaaacacatttctctctctccaaccccgcaccccagtagacaacttgaattctggtgctgcccaattcacgaatcactgaatgtccaaataaacatgttaagattttaatatgcctaagtttatcttttaacatgcctggggacttatctagatgttgctatattctagacatttctaaaaacaaaaacaaacagcattaattaaataagaccatattttaatatttcataatttaaaattatgacttaagcatggcagaaccaacacaaagtaacttttatttgaaaatagtagctcaatttaatattgcatatgtgtataatttgcataaaaggaaggaaaaatatcatttgtgtatgaatagaaactaatggagtgcacttagttgattcattgtgccttttggagaaaagatatagcaaataccgtgttttttaaaaagcatacatttggagtttagtatcagagctcaaggctttagtaactgctttaaatcacacccatatattttagtctttagctgtgacagtaagtgtactcagaaatgtgcacattaaaaaggaatttctcccctgaagatgaagttgagagccaactcttgatcccatattaaattcttagtccatctgtcctaatggagtctgagtaacgcagtttggtgtttttattgcatcctgcgagctgcttttctcctggaaacactggctgctctgtcaggcaatgagtggggagaggcagctggtacaatcacatcttctccaagagctcaaggacagaggctggctgagagccatttggtgggctcactgcctcatccccatactatacaacaatcccacaggccagagcctcacctgcagtccccaggaggaagtaggaagggaagagaaggcaactcacctctgagagtttggcgcaggagaggtgaggaaactgccctagcctagtctggtcacttctgcctcgttcccggctcctcacctcctccaggctccgtcagttgtattcctgaagcacctgcaccaggtgtctgggtggccgttgacacaggagtgagcactggctcttccaaggcagaggtggatgaaaagcaagagcaaactaccaaaaactttgttcttactttgtcatcctgaggtttatctcagatgctgcttgcaccagaccaaagctaccagtacatatgcaggagttcaaaacagcccccacccacccacagagtaaccccaggggcttctcccaattgttgtgtctattggcatttacttcttagagtcccataggactccttggtaggaaccccaactatatcaatctttattgttatataattataaaatattgtttatcataaatattataaaatattttattgtacaatttatagaaattctatattaatatttaattttatatagattgtatatattaatactttaaatatctttatatgtaaatgaatattatatagacacacatataacttttggaaagtcaaaaatatatttgtgaggatttggtccaatgttgttcaacagaatgagagaaaataatgactattgctaatggtacttattaaactcaagcaatgggtatctgttacatgactaggctgatcagggtgtgagttaacctgatttttttgttttcttcccacagggaattattggaatgccgcctctttcccaaacccatcctcctacctgcacttctctactttccaaggggaaactagcgctgacatttctttctacttcaaaacattaaccccctggggagtgtttcttgaaaatatgggaaaggaagatttcatcaagctggagctgaagtgtgagtataagttgcttgtcaactcatggggagccactttcgtcacctcagggtggtccgggtcctgattgtggaaggccttttgattcaaacgtggaaggtttcctttgttccaggagcaggactagaggtggacacacaagcctgagtttgggctccaacctcagtccctgtccttgggatgctctcagggaagcaggcacatccagattctcaagcaattagtcaagaagatgagagagaacacaccgccctgagaatgtgggagaggaatgtttatcttcagcttcatgtcttgtgtggctgttttccaaagagacagggtcaaaaataggtgaggggtgtgtgcattgacccgaggagcagggagtgaggaaaatcatgtcaaggtcaaggaagacaggaatgataactagtgacatccgtgtgagttcaggaggccacggagaccacaggactgggcaattccatgacacagagtctgcaggattcctacagaggacccacacctgcccaccctctgcaagtgagttctggatgtcatgtacttagccaaagatacagagacaataagaggcagagcaagagaggatgctgcttagctcagctcagctggccttggagcaaacatcctaagggggcgttcaggcttggggagctccgtcagtggaaggtgggggttagctgcacaagacttgagaagcgcaatgcttgccctacctggaccctttaaacatcagggccccaattcagctttaggaagttacaatcccctgacttccaggccagttgattatttgcaaatgttgaactccgttggctgtgagagtcagggagactccactggctgtgagagtcggggagatcaaccacaaggacgaggccaggctatgtcccctgtccctttacaaaacctcagccttacactcagcatatcaaaaagtctcccttccggccaggcacggtggctcacgcctgtaatcccaccactttgggaggctgatttgggtggatcacgaggtcaggagttcgagaccatcctggctaacacagtgaaaccccatctctactaaaaatacaaaaaaaaaaaaattagccaggtgtggtggcgggggcgcctgtagtcccagctacttgggaggctgaggcaggagaatggcgtaagtaaacccgggaggcggagcttgcagtgagcctagattgcgccactgcactcaagcctgggtgacagagcgagactccgtctcagaaaaaaaagtctccctttgccaagtctgtcccctttaaatgagtgcttatgttcctgggtctggtctgagaatgatcccaaatccatttcccatttctgctgaaatgctattggattcacagtagcattcttaggttcaattccacaccgtcaggtaaattgctcaatctctttgaatcctaattttctgatttataaaaaggaaatgttaatttgtgggattgtgatgagaatagaatttaaatactcataaggcatttattttggtatctagtagttattgtaattatcatcttctgaggatgcccatggcagatctgatctgagccaggtctgattgaaagggaggctaaggctatcctggtcctagaattaaaattaactaattaattaaaatcccccctttactgaattctggataagaataattgaaaggggattcttgcttccctcagttaaaattaactaactgaatcaaactattttctgacttctacataagttggatcaaattttagaaagattttatggccacaaaagaaaattgccagttctatatttgagtggttctgtaagtttctataaaagtgcttggattcccccatctttattttatgtcctcaagttttgtaaagccacgcctgggtaagaaggaacacatactagatagagggagagcaggtgtttctactcagccctcggggtcaaagaatttctctactttcttctacttttttctttttttttgagacagggtgtcactctgtcacccaggctggagtgcaatggtgcaatcatggttcactgcagcctcgaattcccaggctcaggtgatcctcccacctcagcctcccaagtagctgggactacaggtgcgtggcactgcacctggctaattgttgtggtttttgtcactgcgggatctcgccatgtcggccaggctggtctcaaacccctgggctcaggcagtgtgcctgccttgacctcccaaagtgctgggattacaggcatgagccactgcacccagccactaatttctaattatgaaaaatctttagagctgtcttcagagttttccaggtctttccacagtatgaaaaccatgtggcccatggttcacagtatgaattacagcctccttttgtcaaatacctttactttcactgtatcctttactctgggcaaaaacatgtgaaacgttcaagacccagattcgagcctctaatcttccctcagagccccctgtatctactaataaccagagagggtggaaagacattttcacgatccccaaaatgtcacatattagatgcccatcattatatgtcatctccatcagggttcaaaggagcctcatggagagggaggcagacttctgtatttaagaaaaactacaaagcaaaccaaaagtggtgctttcatgaagaacatggagaaaaaaatggccatgatggaggcttgttgctgtcgctgtctcatcaatcacactttttctttaatttttttttatttttttttatggtgtctcgctctgtcgcccaggctggagtgcagtggtgcaatctcagctcactgcaacctctgcctcccaggttcaagtgattctcctgcctcagcctcccgagtagctgggattacaggggcccgccaccgcgcctggctaatttttgtatttttagtagagacgggctttcaccatcttggccaggctggtctcgaactcctgacctcgtgatccacccgcgtcggcctcccaaagccctaggattacaggcgtgagccaccacgcctggccgctgatcatactttttcagtcagacacttcgccatcaggattcctgagacattgggtagagaattctctcaggcccacttccttgtgtgaggaatcactctgcaaacctaattgttttcacaacagtggcgggctaccagaggggcctcaggaaacgttgattctgaagttaaactctttagaactgtctctatgtttttcccatttagcttgttaggccttctgatctctttctgataggaattcacattttttttctctaagcgtgtctcagaggaatttggtcacagttcatgactacatattgctttccagaatgacagttctgttaattaattacattgtgcccttctgtcaagagtggaagattctcgactcagaaaacaatgagtcagtgtacactaagttaatgagataccatcagcatcttatgcacaagtagaaaaacacagagataaaattagggcaatctcactcattagcatgctttaatggtaacattttaaccctatacttcatgtatttactattcatatttattcattcatttaatgagtatttactgagtatctactatgtcccaggtacagtgctagtgctgaggtaatttagtcaaatcaagtgtgatttctttccctcaaagatctttctgtttgttttagaaagcaggcaagtaactcaggagttatgataataacaaaaatagctcagcttcattcagactttcaggcctcgttccaggcgttttacgtgaatcatctcacactcctaaccaccctgtgaagtgcatactagcattcacatctccattttacaaacgaggaaactgaggcacagggtgagcaagttgcctggccaaggtcatacagccaggaagtggcagagctggtgtttgaccccaaacattatgtgtctgtcccaaagtcattgctgctaaccttaaagcacactgcctcacagaacagatagcaagaaagaggccgggagcactgaggggaatttttaaacctgactggcttgacaaggagcgcctcccagggatggaatgctttaattaaattttgatggataagtagaagccagtaaggtgaagaagtgggggaagaacaggagccagggaaaaaaggaagtttcaggataacaccaaatgaacgaaggtgtcggagactgaaccgaaggacccaggaggggacaggtgcagtggggaggggcaggggccagcaatagcaaggtgggcacagatgagcacccaatgcactctgccagggggagcatctgactcaacatgaccctgaaggctatggagagccagggcgtaacttgatcaggtttgcattcaccagagaaaagactggaagccagacaaccagccatgggagcctctgttaagacagaggcagaatgcatagaaagagaggaagacagtgatgaagcattgtagatatgaaagatccttcaatgagccgagatcacaccactgcactccagcctgggtgacagagcacagagcaagaatacatctcaaaaaaaaaagaaaaaaaaagaaagatccttaacagatagattccacagacattcaacaaatactcgtgagggttaagtggacgggaagatcctagaatgaaaccagtgtttctagttttgatgttgtgtgagtggggcacctttcatgaaggagtctgacattcaagagcaaaatacaaactgcattctggatattttgagactgagtctctgtgggctataggaggatctaatcaagtggacacatctagaggatgctgaatggacaagtccagaacccaacagagaggtctcagaaactcagtttgggagtcatcatcacttagaggatcaggaaataagcattcagtaccctcagcatggatgagattgcccaaaacaaatgtgtagagagaggaagcaagatgtacaagaaagacaaccagctcacacctgtcatcccagtactttgggagtagcagtaggtcacacctgtcatcccagcactttaggaggctgaagggggagtatcacttgagcccaaaagtttaagaccagcctgggcaacatggtgaaaccctatctctacaaaactaaaaataaaacattagccaggcatggttggctgcacctgtagtcccttagcctcctgcccagaggctgaggcaggagaatccctcgagcccaagaatttgaggcagcagtgagctatgatcacacagctgtaccccctagcctgagtgacagagcgagacctcgaggaagggagagaaggaagggagacaaggaagggagagcaggaaggaaggaaggaaggaaggaaggaaggaaggaaggaaggaaggaaggaaaaagaaagagaaagagagaaacagagaaagaaagaaaagaaaaaggaagaaagaaagaaaagaaaaccacattcaaggaatagaaggaagaaaactagtttgcagaaaactaacagagaagtaggaagacagtggtacccagaaaccaaatgaaaaagacatttcaaaaaggaaaaaaagagggttagatattgctgagaggtccctaaaacaaggacataaagtgaccatcagatttaacatgtagaggtcacggtcaaaaagtcaggtatcactagggtgagtggaagtggatttggagatcaagagagggtggttttgttcattctagtttgaggatggtagagactttagcattcatatagttgaaggagaaaactatggtagagaagggggattggtaatacaggagataaagggactggctgaaggagcaaggtccccatggctgtgggcatgaggtagacccagcatcgcagcacctcacaggggtgagaggaagaggcggaagtaaagagaacagcgtaaaccgcccactaggaagtgcctttccaaatcagaatttgttgttgttgttgtgtgtggacgtttgtttgttagtatttttgagatggcaaagaaatattgttcaaaaaaaatttatggagcagatatcagaaaacccagactctaaacttttcttcatcactaacaaccatggatctgtccatgtattttttcagttacccctaagggattagcttgactgctctagatcctttttctgactgagagggccatcataaccagggtcccaacctcgggccaccacctcctgagcacctgccctactgctggtgctgggaggcgctggggaagctgaggtggaaacaggagaacccagcatccacctcctagtgaaggagacaaacacattagtgacagtgtggatacataatttcattgagagctttgcaagtgccaggccctgttctaaagcttttgtaggttattaacttttgtagtttacacagcaagttttatacacattttacagctaaggaaatgagagcatagagttgacactgccgaatccagatatggtgcatttaatcgttaaaataagtaaattacaatgataggcacaaagtattatgaacaatcggtggagaggtatgtgacctatcctgggaatgaaggggaagatgagggaatgcttcagttgggtcataaaaatcaggcaaaaaagttaaaggaatggggaaaagaattctaggaggaagaggcaatgcgaacaaaaacacaggaatggggagtgtgatgggcgtttgggaaactacaagcattttgtattgttagagtgtgaagtatgacacaggcagtgaagatttggggtcaagtctcagatctcattctaaatatatggtcatctaaatatttatctagtatttattgagtacctgctatgtgtgtacctaaaatgaacgtaagaagaagacatggccccatcccagaggcacacaccatctagtgggaaagactagtaatcttaatctctctctgtctctttctctctttctctctctctccctctctctctgtctctcttttaggttcaggggtacatgtgcaggtttgttatattggtaaattgcatgtcacggggatttgatgtacagattattttgtcacccaagtaataagcatagtacctgataggtagtttttccatcctctccctcctcccgccctccacgcttagtacacgtatccatgcgtactcaatgtttagcttccagttataggtgagaatatgcaatatttggttttctgttcctgtgttagtttgcttaggataatggtccccagcttcatctatgttgctgcaaaggacattatctcattcttatttatggctgtgtagtattccatgatgtatatgtaccacattttctttatttgagactagtaatctctgttattataaaactgtgtgtgtgtgtgtgtgtgtgtgtgtgtgtgtgtatatatatatagttttttttttttttggacagattctcactcactctgccagctgggctagagtgcagtggcacaatcttggctcactgcaacctctgcctcccgggttcaagtgattctcctgcctcagcctcccaagtagctgggatcacagacatgtgccactatgcctggctaattttttatatttttagtagagacagggtttcatcatgttggccaggctggtctcgaactcctgacctcaagtgatctgcctgcctccacctcccaaagaactgggattataggtataagctaccacctacagccagcctataaaataatattttggataggataatattagaggtacgaacaatatgctgtggttacttagatgaggcaatatttacttctgactggagaaggagaaaagtttccttgaagatgctaacattttaaaagagccacaaagtaaatggaaaaggaagtttcaggtttagaatgccaaaggaaaaaagcacagcatcatagatggcatgaacacatcaaaaaggtgtggctccgtcatacacccatgctgcgagggttacggaacattagttaccattatatctccagggtcaccacaatgcctggcatgtggtaggaactaaataagcatttgttgaatgaatgaaatgaatgaatgaggtgctagtctgaatggagagccccagaaaatctaggtggagaagcagatcaccacgactgaggtgctggcgatccaaatatagacaaggaataatatgtggaaaggtggaaggacaggtcacggttagtgaaattttggaactcacgatttcacaggaaagcagtttgggcggtaagaagaatgaaaattgaaatggaattttgtaggttgtatcaaaaggctgcggagaaagtcagggcactgggaggccagagtagtgttggttggtcacctatgtcactgttgaggtcatcaatggtgaagacaagaggtgaaatggacagggaatccatgacccaaactttactgtcctggggttcaaacagtgaccacaatatgaacggggagaggacgagtcacaggtggacgcgaagccgtttgaagactctggagccatagagtggaagaagtacggagaagggaagaataggccaactgttcgcctggccccaagatatgggccactcagaaaaggggttacaattctaagggttgtaagttagggtccccttagggtggactgcaatcagaggaaggaagtgtttgaaagtgtttaatgatacaacaaatagtgaccatagagtctatttttgtttaacaatttaaaagagattttagtctgggcacggtggctcatgcctataatcccagcactttgggaggccgaggtgggcagattgcttgaactcaggagttcgagaccagcatagccaacatggcgaaaccccatttctactaaaaatacaaaaattagctgggcgtggtggcacacccctgtgatcccagctactcgggaggctgaggaacaaggatcacttgaatccaggaggctgagattgtaccactgcactccagcccaggtgacagagcaagaccctatctcaaaataaataaataaataagattttagaggacatttgtgaaggggatttttggagggaaattttgaaggaaaagctcactgagtaggtaacattcaggaaaagcaaccagaaactgttgtaatactttaacataagcttccatgttgcccaagtttgagatttttaaggtatcaggataacttggagggaatatttgcatttagcagacatatctccacaaaaatgtgcaggcagcggcctaatgtcctactaatcttaggaaataatatgaggaaaaactttcatgttcaagatgcagccttatgcaatatacatgctcaagaaagtcagaagaaaatattctgcaatatacagaaactgatgagtcagaagaagtaaactaatggcaatttatcttccagtatttcaaaattggaacaactttttatttttaaatagtttcactcttgtagatgtgaagaatgtctaattccacttaactgggctgttgttctgttggggtgttatttaggatgttttaaaaaatattgtgttttttattagtacaaatcaggtgttagcacctggatttttcacacatatattatatttatttatttagaggcagggcctctctgtcgcccagcctggagtgcagtggtgcaatcttggctcaccataacctccaccttctagacttaagtgatcctctcacctcagcctcccgagtagctggtaccacaggtgcacgccaccacactcggttaatttttgtattttttgtggagacggggtttcgccatattgcccaggctgatcttgaaacctggactcaagcgatccacccgcctcagcctcccaaaatgctgggattacaatcgtcagccaccatgccgggcctctggatttttctttttaattatccaagccaacttgggttatcaacatggatttaggaagaattttagtgtttctactactttgcaagtctaattatggtttcaatttatattcaacatttggaatctgaaaagtgattctgacttggtcattactatacataagaaaaaaaactattctctccccaaaaataaaatttgaagacctgaatatttaataacaacacttgtgattaaaaagaaattctctaacttctcgatttaaacctttgatttgaattacagaccaaaaagaagtttggaagtgtaaactaaaatgaaatttgtgctatattaaagcttttcatataatagctttttgttcttaataaatattaaaagatatataaatagttggtaaatcaatttagattaaatttatccagatttctttgccaattacactgaagggacagttatttgaatgtacagtagaggtatcctagagttatgaagatggattttagaatagaatgtcttctggatataaaaatatttcaagttactttagagtttactggtccactcatgtcctgatctggaaatttccagagaagattgggaattcctcctaagctggccagacagagtgacatctctctacagattctagagttctgcctctctcccactacacttcagaggtggctttgaaagaccacccaggcctcctgaccagccctctcacgtggcagctcctatgggtgccacataaccgcagtctctccacatcgcctttcctccccatcgtggagggtaccttcctggtaccaggaaggatcttccatttgaagatacaactgccttcttggtaataattcctttgccttgggcccacatcctggattccaagtaaccaagggcaggctacttccagtcacacccaaagagatggcttgtccctcggctggggctcaacttctgctttggaaaccagctgaagtccaggacacaggctccccaagacctcactagagatctggtgtccttagactctccctattaaactccagcttatttacatagtcacgggcattttaggacaataaaaagaaagtaaacatcagaggcaggatttcctcaaagacattacattgtacatacatgacggtatgtcctgatttctttcatgcgatgctcgaaaataacctaagtaatccacatcgattactgcagagaagccagaagagtaactattcctggggatagctgatgtcaactaggagggggtgcaaaggaactttctgggtggtagaaatagtctttatcttaatgcaaggaatgattgcatatgtaaaaatgtatccagctgtgcattaagatatgcacattttaccgtgtataaattacagctgaatggaaaagtagaaaaagagaaaaactctgctctgagaaaatcttgaatgacaaaaaagttaataaatcactcaatttttcaactacacttagagagaccaggattctaagctgactgaccagagaccagtccttgaacctctccagactttatcatatccacttgtaaaacaagaaggttgaacaagatggtatttaaggtctcgtctaccatgaacaattcggcaaacctgccggagaccatcagccatccagtgtggcttaccacctcccaacctaagtgaactcacagccaagcagcaccttaacttttcatgccagggttctcagttctcctaaggatgatggggggagggatgtgccacaataaaacacatctgcttccagtaattccagtcagcatatatgctttcaccaaacgtagtcaggagatctcctaacattattgccacctaattgtaaatgctaactaaggagccatcagaatggcccacgatacctcaagctcaacatatcgaaactgaaatccatcattttcactcaaaagcccccttctgtgctcccacttagttaatgtcatggccatcttcttcattattcaaattagaaaactcaatgtcctatttaaagttttactaacctccccataggggatagactgttttatcttgatagaacactgcatttttaatataaagaaatgctattcttcctgtaagccatcataccagaacaatgccacagaaagcatcaattcctactagtcataaaaggcagctggaacatagatgtgaacataatgaaatcataccaaatgtctctacctcccaggatggctttgctagttgaaatccctggattctggattcagacaggctcataatttgactccctcactccagtccctctatcctgataaccaccctccctagtgaggccaaatttctacagatctggtccagttactcctttccttacagaccaccatgattccccctgtgccttataagacaaagtacaatcccaagcttggtaagtgatttacggcctaacttaattttcaagtttttttcccctactccatacaagctttgcccctcacccaccagcaccatgtgccacagcctcagctatgtccagctactgatattccctggacaccactacagtttcctaagactgactatgtgtctgcctgttccggaattgcttccccttcattgaaatcctgcccacacaaaattttttttatcattttgcatcttgatttataatataaaaaataagacagaagacttcatttccccaaaaataccaaaatttttacaagacaattcattaggtgcattgcctggaaagtagcaggaatcctcattagtcagcatcttcacatagcatttgtctgaatggagtagtttatcattactccaaagacatactgaagtttcattaaaattttttgatgtaatttttcttctatctcactctcttggattctaacgttttcttttctcttttcttcttcttttttttttttttttttttttttttgagacagagtctctctctgttgcccaggccagagtgcagtggtgcaatctcagcagctcaccacaacctccgcctcccgggttcaagcaattctcctgccttggcctcccgagtagctgggaccacaggctcacgccaccacgcctcgctaatttttgtatttttagtagagacaggttttcactgtgttggccaggatggtctcaaactcctgaccttgtgatctgcctgccttgacctaccaaagtgctgggattacaggcataagccaccacgccctgccaacactttccatattatttactctatgtggtagttcatgaaacctttcccttctaaaagatggcctgttaaagtgtcaaaaagaccaacaactagaattggcctgcctatgaccatctgtaagacaacagaccctctaagagaagaaatcaaagaagtttgaattcacacattctgagacagacggaagaaagatatgctattattgctggataatgaacacatggatttatgagaaaagcagaaatatatatgaaaaatttaaattataataaggttagagactttccatctgccattctaggagctaacagtatctccataggcttgatatttttataaaaacaagtgcttcaagaaaagagttaacagtcagtcagtgtgtgttgctaatgctggagaattgattcaactagggatgacacttgggaccaattaattcaaagctggctttaaaaaaaaaaagtagatacaataaatcagggagtagagcttcatttaaatatagtgagggactgggatagattacttgaaaaagctcagaaccaaagattgtctcaaaaggccaaagacaactataagtaaaacaagtgctaggtttctataagctatcaaacactgaaatcaaaaccatgaaagaaaatactggccaactggatgtcaactggaaaatttatacaaagtttgttaatttgtacttgtatcccctcaatctataaaaattttaaaacatgttttaaagcaacaagaaataaaaacagtttgttataaatgaaaattttcaggaagttatcgttctcaagatgcattttactgaaattacaagacaatttttaatagcaatcaagtaggaaccttgaggagaaatggggaaacgtaaagacttacatgaaatcttatacgggagtgtggtcacagtaaaaatatatcttctttaaaaagatgtttctatttcttttgtattgctgttttacctttaattttttaattttttttttttttttagtttaggtacttctcaatttttaaggggattgtgctctagaagtttctgatctagttgttcagaacctgaaatgtattttaatgtagacaccgcattgtatatagcactcacattccatagctaaccgtaaagagctctgctgttgctgtagttgagtgttgattcaaggtacacaggacaggctgagatctgggtcctggcttctggaggccatgagatgtagaatagaaatgttgaagaacaaaaagaattgtttcttgtatttctgaaggtcaagcttgagcatgacaaacttctccacagggaaagtttttatttgcctttttgatagtcaaatcacggtcctgcctctccttttgttgggagcctcattttggtgggttagtaaagggaacatctccaacattcataggagcatttgtttaaagggctcccacgtggcttccagccacttctctccactctgaaacttctatgaattagagaatccccctaattcattcaaatatattacggcctatatttttttaatattacaatgatctgacacagttgggtattgaaaatagagtaaaaccattacaccacaattatcccttcatccctgatgaacatcctcttgtccatttttttaatcatacgaataaatgaaaaaaatgtgataaggtcataagagagttaggaacattatgtaatcttctttaaaaataagataagctgctctacccagtaaaaccctaggtttctgcagccatatgacagtctgatatgcatgctatggtcggtcacggtggctcacgcctgtagtccagtactttggaaggccgaggcaggcagatagcctgaggccacgagatctagaccagcctggccaacacggtgaaaccctgcctctactaaaaatacaaaaattagctgggcatggtggcgtgcgcctgtaaccccaactactcaggaggctgaggcaggagaatcgcttgaacctgggaggtggaggttgcagtaagctgagatcgcgccactgcactccagcctgggtgacagaatgagaatctgtctcaaataaagtaataataataataatatgcatgctatgctctggtccatgaagaccttccacacagtgatttagaggttcagactccttttctctgtggctccaccatcgtctagagcccgggaagtctagctggcaaagagagaaagggaggatagagaagcattctctcttcttgaccacactgaaccagcgtgaacacattccttgccctcctccctttggtaagagctagtcacatgtctccacctggatgcacagggaccaggaaggcagttactggctgggtagcagctttgcgggagtgatgatgaaaaggggaaagaaaccttctgtgaatggttagtggtctcttttacaggtactatgacaccaaaaaggagtaaactttaaagacaccaaggtaagtttccaggagatgcagcatttgatttgcattgaaggatgacaggcaaaaatgagataagggcatttttctggagagaaaacagcataggcaaatgcaggtgggggaggaagaccgtgcaacatagaagcaattgaaaggaataaagccgaagcccaaggaccacttcaaagatacctctctctagagaaatgacccaccgcctatctgttaagagtttgacaaatgaaatctggctgaacctcaggccttgtcggaaattagtcattttgcttgcctttgcggatggtgttaaaatgatcaaatttggttttctgcatctctgagtttgattcctctgatgagaactgatgcgaatgccaactgactttttatgaagagtggttgatatttagtattctacagagtctttctgggtaagtgtaaccagagccagtgaataatagaagcagtgtatatctgtcaagtgtaattataacactgaattatgctcatcctgcattccggttcctgtatacattagtttaaacatcagaacatgctggcatttcagacctgtgaggattttactttgaaaaatagcatgcccttgtttttagccatttttaacaggaaaaaagaacttatatcttgttcaaaattattttatggtaaagtttgaccactctgttttttaaaaaaatcttctcaagtttctaaaaatagggaagaaatgaggaatatttcagtctagttttaaatgccctctaattttctgtatttaaataaaatcgtatacaataaaataatatcttattttgataaactgaactttctgattaaatagttgttaaagttacagaatagagttgcttataaagtcaccaatctttgccagagaaagtggaaattatcagattgtaactttaaaattatgcaagtattgtttatcgttgaatgatttaaaaattcagagcagcaaaaaggacaaaacaaaaattcagctataatcccatattccaatatatttaaattatcattttggtgtctatatttctaaacatttttctatgcatttatatatactttttttttacaaaaatgagatcatagggtacatactgttttgtaacctacttttttatgtaataatattttaagaacacattttcatgtcatttttcttaagactccataacaatatttttttttcaactgagaacaaggaccataccagaatctccaagagggcatgtgtagtttgaaaacttataattttatatttagaaagaaaacccaaaaatagctattgttttggtaatataacctacagaatataaagcatagaaatttccaattggctggtcggatgtttatctgggatcttctgaggtttgttatattaccattagcctcctacatggggcatgattagattactatgtcaacaaatgggagcacagattttgaaagattgtgaaatacagtgcctcaactgccaagcattccatttaacccacagtcccttgctgttgggcttaacttttgaaagataaatttccacacattctgatccactggcttctggttgctcattcccaatcataacatatgatagcatactatctattttaagtatgtgatatgcgattgctttttatcacatactcacatatcacagcctcaagctgcagggcagctcaaatgatgaaagtggaagacaggccgggtgcggtggctcatgcctgtaatcccagcactttgagaggccgaggcaggtggatcacctgaggtcaggagctccagaaaaacctggtcaacatggcaaaaccctgtctccactaaaaattgaaaaaatagctgggtgtggtggcaggtgcgtgtaatcccagctactcgggaggctgaggcaggagaatagtttgaacctgggagggggaggttgcagtgagccaagatagtgccactgcactccagcctgggtggctgagtgagaagaagagaagagagcagaggggaggggagggggggaagggagggatggggaaggaaggagggagggagggaggaaacaaggaaaccacactggaaggaggaaggaaggaaacaaaccacattgggaagagagggaggaaggaaggaaggaaggaaggaaggaaggaaggaaggaaggaagggagggagggagggagggagggagggaggggaagggaagggaggggaagggagagggagggggaggtggaaggaatggagggaacggagggaggaagggagggaagggagggagggaggaaggaaagaaggaaggaaagaaataaacaaacaaggaaaccacattgggaaatccaagcaaagatgggctcagcaggtcacatggtttggatatttgtccctccaaatttcatgttgaagtgtgactcccgatgttggaggtgggaacctagtggacagtatttgggtcatgggggcggatccttcatgaatggcttggtgctcttcccatggtaatgagttcatatgagatctggttgttttaaagagcttggcacctcctcctcctctctctcgcttcctctcttgccatgtgatgtgctgctgttccttcaccttccgtcatgagcataagcttctgaggccctctctagaagtcgatgccagcactatgctcatatagcctgcagagccaagagtcaaataaacctcttttctttataaattacccagccctaagtatttctttatagcaaggcaaaatggactagaacagctggatagtactgctaaccgatgaccctatccccaaagctgtttccattcattctctttgttgagagtatgtcaaaccatcccaggatggaggctggagatgagtttaaccccacctgcaactgttctctcgatggagctactctacagaaaaatcatgttccattagttcactaaatcgtaacaaaagtaaatgtacttgtttgaacattgtacaaactagtcctaaaagggttctcacgtattttatatgcgcagtctttagggaggcaaaaatgttttatgcaatctatacaagaaagttatattttcagctgttatccaaaacaaaggaagcgtactctgtgaaaaattggtattattgtttaacaatatccatttccagaggaatgcttttcttaagtagaagttggctgacacaaccataagggatgctgtgaagtgatttctgtcatttttcatacatggaaacatatgaactcaagggtctactaactcttctacaactttaaaggagcacttatcctgggatactttcaaacctgagattctgagattctatatttttaatgttcaacccttagtttcctcatttctaatattcattactaagtagacgataaagatcaagttaagcatagcttcagaaaaactaataaaataatttaaattggttatgcatctcttgtgacgattctaaggcaaaaggcacttttatagaagtctttcacactttaagaaagcttgctatatagaaaatgattcagttgggcacagtggctcacgcctgtaatcccagcactttgggaggctgaggcgggtggatcacctgagttcaggagttcgagaccagcctggccaacatggcaaaaccccatctctactaaaaatacaaaagaattagccagatgtggtggcgcgtgcctgcggtcccagccactcgggaggttgaggcaggagaataatttaaacctgggaggtggaggttgcagtgagctgagatcacaccattgcactccagcctgggcaacagagcaaaagtctatctcagaaaaaaaaggaaggaaggaaggaaggaaggaaggaaggaaggaaggaaggaaggaaggaaggaaggaaggaaggttctcctttcctctctaatgtctctccattcccatttaaagtctctgttgatctgcagcataattttacttttttctccactatttgtccaatactgcaaatgcactgtagttgaagagaatctgttgttgtaatggaaaacagaatcaatctctttttatactctgagcctatagcatgtagtatatatgtcctcatttggcactttttaattttcattacagagatcttctctgaagtcatatcaaggtgacactgaaaggatttgatagaaaggaaacaatttgtggcaaaacagagagagaaaaatactacctgtgatacaacctatcggcagagtcacaagtcagtccacagaaaccagaaaacagacgtccccttggctgctttccttctgatagacttatctaaagctctcactagcaagcatgctccttccaaagccatagcctttcatcctcagagttcatctttggcttttcctcattatcagtgtccctatcaagatagccatgcatagcacagttatttagaaggcacaattaattgacttgtatgctgtctccttgtaagcttcagcttggtctgtgttgaaacttgtcagcttttcccccaattcatgttgtttcaacctgcagttttattacctcctttggatgccaaattctcctttctccttgcactctccaaagccatgtattttgatgaactggctctctctgacatcacctcaaaccaacttaataaatcacccctagtcttctaccaaagcacatttccttaaatgagttttctcattttgccgcacaacctgaatatggtcggaagaaacacttctttgaagtccatcccctcctcaatctgctctcctcttcatctctaggggatccttaggtatgagtttcagagtttctctaaagcagcttctgggtttccctttattacaacactctatccccagagtaaccatctgggacctttatctattcttccaaaatgggtactgtctgcccaatgaacagctgtgctctttccaaacaagagggtatttaaaacccaactgcaagtcctacatggggtacaggggattgttgccagccacatatcattttggaactatttttgccttctttctttttaaatcatataggcctattaatattcaaggagttattctcaaaaggtggttaaatgcatagaaaaactaaaattagaagagctttgcattttaaagacagctttctgtttttgtatggccaatggtatctcccttttgcttccttttctctgtggatgtctttgtttgtgaagttattttttaaccataataaaaagcttaaaggccaaaatacataaagagaaatacttcttatactcaagaggttatcgagataccagagattttaaaatgagttcgtaacattgattcctaagctccaggcatttccttgaagaatttccagaagacttcaaataaatttttcttgccaatgttcattttcagatgtgtttaacaccaagttttctggtgtgaatatgcatatatgactctaaaaatctctacattcagaaactaaaactatactaaaagaaaaataggtcattttttatttccttcataatatgacaggcaatacagtagttaggaaaactaaagctctatatctagtcattactggattttagtgtctctcagcctcagtttcctgactaatcagtgagggtgggctcaggggtcgaagtctattcactgaagcttttaggtcttaacattattggattcaatcacatacttcttttttttgagacagagtctcacactgttgcctggtctggagtgcagtggcgtgatctcggctcactgcaacctctggctcactgcaacctccgcctcctgggtcaagtgattctcctgcctcagcctcccgagtagctgggattacaggcaccctctatcatgcccagctaattttttgtatttctagtagagatggggtttcactatgttggccaggctggtctcaaactcctgacctcataagccacccgcctcggcctcccaaagtgctgggattacaggcatgagccatcgtgctcagcctcaatcacatacttctaagctgatgtgattgtttctgtttttgtggagttacaaccagttgcaaatttagagagaccacattccccataagactgcatatgcttctgacaccaattgcaagttcagaagttccccaaaccacccccaggtttgatagttctgtagaaggactcacagaattcactgaattctgctgccgaaggctgctatactcatgctgcattatgggtgaagaatgcacgtgaaaatcagacaggggtagaagcacagatggcagagtccaggaacagtaccagatgctgagtttacagtcaacctctctatatagattcaggagcacatttctttcctggaacgggtgtgtaacaatttgcatggggtattgccaatgagggaagcttcctgagcctccatgttcagagtctttactgagactccgttatataggaatgattgattgcccacatggctgacctcagtttccagcccctcagaaggctggagaatataagccaaagccccacacccttcatcacattgttggtcaatctggcatggtaaggccccatcttttttctttttctttttttttttttttttgagacagagtttcgctcttgttgcccaggctggagtgtgcaatggcaccatctcggctcaccacaacctccacctcccaggttcatgtgattctcttgcctcagcctcccaagtagccagattacaggcatctgccaccacgcccagctaattttgtatttttaatagggatggcatttctccatgttggtcaggctggtctcgaactcctgacctcaggtgatccacccgcctcagcatcccaaagtgctgggattacaggcatgagccaccacacccagcccaggccccatcttaaatgccatctggtgtggccctacccctaaaacacaatgttagactatctggaataacccaaggctcccaggcaaatgaagacatgcttaccaggcaggacatcccaagggcttagatattaccttcccaaagccaaaggcaagggccagacctcttgagggcaaggctaaattctctattacacagttctgaaaatctctctgttgaggacaagaaagcaaagattcctaggacttactactagaaggaaacctgaaactcctaatgtttcttaaagtaagattccaggaccacttgcgtcagaatcacctggcattaacaaaatgcagactccaaagccccaccccaaacctactgaatcagattctctgtaacagaagcattggaatatgcattttaagcattttcctttagcagttttttatgtaggccaaaacttgagaattgtaattaagatccaaggtccctgttcctacaagtagagtgaaactagcatgcaataaagcaaagggagaaaattctgcttcttattccactggtgagtttatcttgggcaagccattagtcctcaaacatcatatgtttgaaaataacgtttagctacatttgttttaaacagacataactaatgtagcatgctcttagactgagaaaatattcattgagttactttgtgctcttgggaaagatgcttgtggaatacaagatggaactccatctagttcggctggccttgggaaaatgagtggatttctcttttcagagtatccatgtgatcactgttgccttcctaggcaggagtagtttctattcatcctttcattcattcacaaattggtatctactgtgtggcaggcaatgttctcagtgctgaggagagaacaatgaacaaaacagaaaatgcctctgccttcctgaggccaggaccacatatatattattccagatagtgatacatgctatgcagactttttaaaaatcaggattaaaggggaaaggacagctgagagcgaagtttgttatttaacatagaatgtttagggatggagtttctaatatgatgacttgtgagcagagaagtaaacgctcagccacagagttatttgggtaaagtgaacagcaagttctaaggccctggggcaggagcagtttcaaatgttgtgaaggagaaagtcctatgtggtggaattagaggaagactaagaggagtggaaatagatatggggagtacagacatctctttcaaggaatttggaaacaaaagggtgcatagaaatgaaatggtaacttttgggatagataaggtcaaaagaaaggttttatagtgccagtggttgttaagagtagagatatgtctctgtgtgtgtgtgtgtgtgtgtgtgtgtgtgtgtgtgtgtgtttgtataacaacccagttgtagagggaggggagaattgtcagagtggtgtccttgagctggtaggaaggatggcatcccgtgtataggtgcagcagttggccttgaattaggaacatagatgaactctttacttctttctccttatctctctgattcccatggcgaccttattttcagccttcctgcctcttctcatgaccctttcgtgttaaataaatccttttatcttctgatgtacagttagtacttcattcagaaaaaaaatacaggaaacaaaaaaagatattgataacactgttcaccatagagtgaggctgaaatatctgttctaccaattaccagttttgttgtatgactcaaatgagatttattgtacagaagatcccccaggaagctgccacccctcgaaccttattttagaatggaaaaaacgtatcattaccaaaactaaacagtgttagctggtctgcccatcatgctcatgctatataactttccttctcttttctcttatcctgttctgtactgaatggccaaattttttctgctacttcaactgaaactgtggtctaatatctaaatgctccctcacctgctgagaaaacttagagccaaaaacacctggtattggtcagttgttaaatttatcgctcaatatactaagcttggagtgatttgttgagttagaatgagagcaaatagtgccacctgctggaattacacttggaaggggaagcgtgaacatgccaagagctctccatggttttgtcccaatcattactttaagcctttcagatgaagtcatgagcctgctttattagaaagtaatttcttccacctatattcttttctgatggcaatatgccaccttatgtatttctcttttagtatttctcttttctccctgtaatgattcagtatctaaaattaccattaagaccagctgtatttcattttatttctcttagaatctcttgaaaaattatagaatgttgccatttgaaagaaccttagaggttctccgtagtttcaaacacattttggacacaggaacttttgggaaactatggatataatcctcactttggacctcaaactgaggcctgaagcgtgaaaagtgaaaagaccaaacagctgaggctctatatcagttaagatgctttcagttacaataaaaatggcttgagcaataacataacagcatatctcacataagaaatcctaaggtagatggctctgggattaatttaaaagttgagtagaccaggtgtggtggctcatgcctgtaatcctagcacactgggagtctgagatgggtggatagcttgagcccacgatttcgagatgagcctgggcaacatggcaaaaccccatctctacaaaaaatacaaaaattatctaggtgtggtggtgtactcctgtagtctcagctacttgagaggctgaggtgggagaatcatctgagcccaggaggtcaaggctgcagtcagctatgatcacactgccacactgcagcctgggtgacagaacaagaccctgtctcaaaaaatacaaataaagaatttttaaaagttgaacaatgtcagccatgacccaggctcatcctctgtcctctctgtcctctgtatctctgacatttgtgaggcagctccagcaacattaagaaccacagcttcccacccaatattaaggggcagaaaagggactgtcttttccttataactcaccaaaagactccactcatgtttcattggctagaagggaattatgtgtctcatccaaagtgggtagctggcaaggagcctggaattgccatctttgccttcattaaatccagatccatcctgtgggccttgggtagggctgtccttatgcaaagtgcaagactctggaaacacagagattccagggcaaaatccggttagctcacaaagaaaaaagggaaagtgactaattattgggagaaaaatctccatgggtctcttccacttttgcctgccttctgagcaagaagcattgacagctttgtttataccttttttaaggatgtgtgtatagctaacagccttggaagatacagatagtgtcttcctctgggacagagggtagatttatttcatggccagagtaagaaatataatgtcactctccggggcagaaattgagcaagtttgctagtagctactgtaaaaagattggggtttcctaagtccagggtccctcagctgtgaagcaaacttattgcatgtgcagcatccacctgggatgccctgcattcccctgcaagggaaagcaatgtgaacgggaagctcaggctgcctgctgtgttgtgagtaaagaagtcctttgtctctgacccaggagtttcatgtcttctgccagcatcatcagactgtggccatgttaaactatggttctgccagcatcatcaaaccatggctaacttgttagcctgcaagtggggtaaagtctcagacccttcccagttcttgatactcatggaaaggcaaccattcatgtttggcacagtgttctttccaatgagccaggctatatgcatccaattctcaaatacttatttctggaaatgagaatttgttcggtatataagaaattcctttttcacaggcagaaacagggcaacacttcagtctccaactggagacacacattaagcgaggacagtgtcattggctcaagtgtcttttatgctgtctcccttttattcgctcactctctctataattatctcttttaaaatgtcagttgctctcacccagaagaccaagagcaatcagccacaaactgaacttagaagcttttaaaacacactggctgtctgactgggggatgggatttctcaaaggcttcccgcagcaatgtcagggaagctgacattgagtggctgagaaaaaagagccctttccttggctctcacagtgggtctttcagatccttcctgaggaagcaacggaaggggtgtggaatgtgctgacttcataaatatttctccagcagagcctgaatggaggctgtttgggaagaaagttgctcgtggggtcctttggccttgagtccctcttactgtatcccattagggtgagaggctctgagctacggcatcgtcctggcaactttcttcccttctccagaataaaatattgatgttaaggtgacggtgaagaaataggggatctattgggacaagcaaaaagtatagatattttctagcgacttctggcactcagagtttttccaagtagtgacagtttgaagacctggacacgaattcatcatagcagtaggagaatcacagaggaaattagaacagcatttatccctacgagtcaaaccttagggttaaactcaatttatccctaaattctatttccttgatggcagttgatgcctttaaaatgaaacaatctttcctacttagcccaggaaccctcgttctcttgctgttctgacaacttacatttaaaaaatgctcctgctaaaatacagtgttatgagaacagaacagatttaatctgaaaccaaggctactttttcctcatctgctgtatcagaactacagagaaagatcacacagcctgtgggtcatattatcatcttcctgcattctgatcatacttccatggaaaccttgatggaggtcactggcctgcaagttcaatccagtcccaatgacccctggaggcaggggcttctaatttagatgagatatttttctgaagtgtgtgtccaatgaccacaggtgttgaaatgaaagttctctcgctaacgacatgaaggatcaaaattccttggtacaattaggttgattaaattgagctctgtgtctaatatccctgtagctcaataaagttaatgcagctttccaaggggcccaacacagaggcagggaacagtctaggtcctgagagaatctggcccaccatggtttctaaattagaagtttgattgcttgtgacatcgtcttaaaatggtaccagccaaaagaagctgaattttccattagcccaggaaaaaaaaatgacagatatttaattaaactgcttagagattaggtggaaagcttattgatggacagaggggctgaatatctttataagcaaagttaggcactggtgtgccacatctttaatgttgagaagaattcacccagcctaagggagctgaagacgtgtgtgctgcttcagcctgaggctgcctctcctgtcaatcacaagaaaaaatatacatttaaaaagcttgtttataaagcactaggtggtcactgaggaacttaacataaaatataaaatgtgaaattagaaagctacttatagctaaagttaataaagcaaccacccaatccatttgccaattgttgagaggtgactaattgcagaggaaggttgatttggaggtgatctctaaaaaaaagaatttgtggtcagtgctagagggtaggttatgagaaggagcctacaacccagatggggaataaccaaggtttgcaacagacgatgtacgacagggattattctccagaaatgttgtgctacctttcaggtaggcacaggtggtcataaaatgtaggtcaccctcattacaccaacaataggtcaccctcattacaccaacaataggttaccctcattacaccaacaataggtcaccgtcattacaccaacaataggttaccctcattacaccaacaattcaagggtccccaactttcaaaagagtataaagatcaatgaaatcaagtttcataaattcccccaaagcagtagctctcaactctagctatgtgttaacatttcctggggagtttttttaaaataccagtgccaactcttgaccaactgagtccaaatctctggacacaggtgtttcaagagatctccaggtgactatgaatcacttcccaaggagctacttactgaaaaggtaaattgtatgtggaattagaagatatcaggctctgaaatctgacaaaccttggttcagttcgtgactccactaacttactgaatctaagacactcaacatgcgctaacttctccagacttcagtctccttatctggagagggtcaatgatggtcacatcttggaaggcttctaaaattaaataaggaaataaatatatacctgacacatagaccccccaaaacacccttggttattaatggttaatgattgacattttatccttcttccattgattttgccatcgacctttgtaggacgtgacaggcttagatgatttttcctctccctgctttgtttgtcgtctagaatttactgctatttggtatctgggagaaaaatactcatgtttttcatgctttctgctcctccagctgccacagaagtgtccttttcatttgatgtgggaaatgggccagtagagattgtagtgaggtcaccaacccctctcaacgatgaccagtggcaccgggtcactgcagagaggaatgtcaagcaggccagcctacaggtggaccggctaccgcagcagatccgcaaggccccaacagaaggccacacccgcctggagctctacagccagttatttgtgggtaagtaatggaaaggtaaccatggcttccctctgttgatttttaagagcctgcacaatacaaaaaaaaaaaaaaatcagcctatgcaaggtttgatatagagatccttccaaaagtaaaggtgttggcctcttgtagtctccttcaagacagaatggaataaggaagaagtttcaggagacctagatctcgttccacttccactcttgggagctcactgtcctcagctataaaatcagagtgcaggctgagacatctctcaggtctctctaatatctgcaattttaggtttatggttttagaagtgtataaagttatttgatcatttggggcacttgtaactgtgtggaaggaaaggaaggaaggaaggaaggaagggagagagggagggagggagggaggaaatgggctaagttcagatttttttgaaatgataaatataaagccattcctttcttgcctattctcaaggttctaggcagagaaagatttagacttttcctgacataggaaaaaagatcagtacaaaaaagaaatttaaacagatcaaaaagttaaactacctatgcaagaagtggatccagacacccagtctaatctttttcacctgtctttctgctactgacatatttcagatgaacctaaaattacttcaaattcatacctgcttcccatggctagttgaattttaaattttgtttttgagaatattcatatgttaggaaattagcaacttttcctctgttgaatgaaataaagaagtgagtttgaaggactttgtggatgcatcatcttagacccctctctagggggtcaattgatcagtgcagtcaactgtggaagtctcagacaaagcaagataagaatgtgacttggttgctgttcatattcataacacctgccacttgggctccaccctacgttacagcctcactgagagccagttaattttaacaaggggcagagtccccacagtgtctttcatagttgtgttgggaagcttgaagagcggtagaatgtcattaaaggaaaggtaaaattagatctccattcattttgtgtgatgtcggccaactacaaaacaaaggtgtgggtcaatgagctttgaaagtgagactgacttttaacaaccacatcagctggggctataaaagagttatagatttagaaataaagtatttcctaattacaactggaaatcagccctttccaaatccttccctcaagttatagatcacaaaattacacattattttttaattagctaaatatcaggtccattgatccctgctgagcacagtgaagaaatttcacttcatcaacatgtgtggcccagattagctaggacaagtttcttcctaaatactgttaattctgaacatgctgggtagattctatctggttttcatcataacaggtgaccctacttgactcaacttctcgtttttttgaccctgcccctggatatagaagtccaactttagttttgttcctttctgttggctaactgtggctgtgtgtaagaattttgaagacctagtaaggttgtaaaatgaagagatggaagagtatttattatggtcttggaaggaacatcaattcacttaaagaaggtgacccaataataacttaagaaaagagcaagggcctgagatcagaattctacagaaccatggaatataagggataaacagaaaaagaatatctcaggaagaatgaagaggaatagaaataaggaaaattaggagagagtaatgtcacaagaggaggaggatttgattaaaaaggtaatggcaaataatatcaagcaccatgagtaaaataaggctagaaatgtgcgtgtgtgtgtgttttgagatggagtctcatcctgtggccaggctggagtgcaatggtgtgttctcaactcacgactcactgcaacctccacctcctgggttcaggtgattctcctgcctcagcctcctgagcagctgggactacaggtgcatgccagtatgcccagcaaatttttgtatttttagtagagaaggggtttcaccatgttggccaggctggtctcaaactcctgacctcaggtgatccacccacctcagcctcccaaaatgctgggattacaggcatgagccaccactcctggcctgtgttgttttaatttagcaattgtaaaaccattgatgaccgcagaaacagaaatttcagaacaggaggctgacgtgatgagtcagcaatttcttttgactagaaaatagtctctagtcccagtttctaattcctgtcaccttaaagggaggcacaaggcacatctctcagatatgagctactttagccaatttgtgaaatattgttcggcaatagaagtctacctcaggtgaagtgagaggggttgttacaaaaaaaaaaaaaaaaaaaaaaaaaaaaggacggccacggtggctcacgcctataatcccagcaatttgggaggccgaggcaggcggatcatgagttcaggagttcaagaccatcctggccaacatagtgaaaccctgtctctatttaaaaatacaaaaattagggctgggcgcagtggctcacgcccgtaatcccagcactttgggaggctgaggcaggcggatcacgaggtcaggagatcctgaccatcctggctaacacggtgaaaccccatctctactaaaaatacaaaaaattagccaggcatggtggtgggtgcctgtagtcccagctactcaggaggctgaggcaggagaatggtgtgaacccgggaggcagagcttgcagtgagccgagatcgcgccactgtactccagcgtgggagatagagtgagactctgtctcagaaaaaaaaaacaagactctaaaactaacacctagttcaacagctatgaatttctggagccacttatctccaaactattcagttagaatttagggacttaggtgttagtctcagttcacctctaatataaaagcattttcttgaccaactattaccatcttccctctctgagtatcttctatttctatgttttgtttgtttgtttgtttgttttacatggagtcttgttctgttgcccaggctggagtacagtggcatgatcgtggcttactgcagcctcaacctcccaggctcaagggatcctcccacctcagtccccaagtcgctgggactataggctcatgccaccatgcctggcatgaggtctccctatgttgcccaggctgatctcaaactcctgggatcaagtgatccttccacctcagcctcccaaagggccggaattacaggcatgagccaccatgcctggcctcttccaatattagacattttttattacatgcttggtaatgattgaacaataccagggttgccaagtggtcagtcttctcacaatggtgtgtggttaacaatatggtctttgactaccacctctgcctcttgccaattgagaaaccactgacaaattgcttaatatttctgtgttaattaggaatacagctcctacaccacagtattaaatgagatattccatgctaagcactcaggagagtgcctcgcctagggcccataattattatcattattattaataatagtagtagtagtagtatttgagacagggtctttctctgtcatccaggctggagtaaagtggcgtgatctcagctcactgcaacctctgcctcccaggttcaagtgattctcctctctcggcctcctgtgtagctgggattacaggcatgtgccaccgtgactggctaattttgtacagaaagggtttcaccatgttggccaggctggtctcagacccctgacctcaagtgatctgcccgcctcagcctctcaaagtgctgggattacaggcatgagccactatgcccagcaggtccattctcattaaatgtgagtttctttttcctttactatcctttaccttttattccctttattttcttcttcctccatgtaatagttacccttctcttaaagaagcctctttcaatgggctcattacttctttcttgaaatattgacttgaaatgtgatcacttccactcaccaaccctacaggaaagctcacatgcagagatgtccctcaatattcagaattattctgctagtcctcagcttacctgcagaggccacagagcagcaaactaaggcccaaggattttttcacagtcagccaagaaatcagaagttcatctgaaaacatcacaccagcatccctgcaacagctaagatatgtgacagaatggcccaagagctccacctaggttccggaaggaagggctttcatacaaattaaagctgaaacagactgcaaatagttcttggctttgcacacagagctctacagaaggccaccttccacccactaacctgtgttaatgtaattgcctgaagggtttttcttgcccgctacacaggtaaaccaaattcactgagacaatgttattgcagtaaataaagcgtttaattaacacaaggacagccaagcagaaggactggagttattactcaaatcagcctctctgaggactcagaggctagggtttttaaggacaatttggtgggcagggggctagggaatgggtgttgctgattggttggagatggaatcataggggtgtggaaaattgtcctcatgtgctgagtctgcctcagggtgacagccacagaactggttgagttctgcgtcccaagtctggatggaggcaggtggtttccagaatgcaaaaatctgaaaaaaaaatctcaaaagaccaatcttaagttctacaatagtgatgttatctataaaagcaactgaggaagccacaaatcttgtgacctccggccacatgactcctgagcattaagggattctagaaactacacctacattttaacagagttcaggcctctcccataattctaatctcatggcctttcattggttttacaaaggcagtttcaatcttccagccaggagggaaccagttttaaggagggacaattatcatccttgctttaaagctaaactctagctgggcacggcggctcacgcctgtaatcccagcactttgggaggccgagatggggggatcacgaagtcaggagatcgagaccatcctggctagcacggtgaaaccccgtctctactaaaaatacaaaaaaattagccaggtgtagtggcaggcgcctgtagtcccagctactcgggaggctgaggcagaagaatggcatgaacccgggaggcggagcttgcagtgagccgagatcgcgccactgcactccagcctgggtgactgagcaagactccgtctcaaaaaaaaaaaaaaaaaaaaaaaaaaagctaaactctaaaccaaatacctcccatggttagtttagcctgacctatgcccaggaaggagcagggacagccaggctgtgaggctagaagcaggacggagtcagccatgctagacttttcttgctgtgtgatctttgcaaaggtggtgtcattagcgaggccaggctcacatgtccttttgcaaagtaaccgaaaaaaaaaaaaacagagaagacacagttcacctcactgcacatctaaaatataattagaagctgtcatcccaaaagggttaacacaggtcttttggaagttgtaagaatccagagattattctggtttaatcaaaaagtaacaaatacatttaaaaactaagagacacagaaagaaaaaaagcacttgctggtatttgtctgaaaagtgcaggaaacttttcccattttttgatccaaaatgagtgtccagcatatgacgagctccctggatggcccagcagaagcacttaagccacatgttgatctgaagcctcagccagcccaggtgttcggacctgggctgtccgtgggccagatttttcttaggcggtggagaaagcaaacaagctcatggtcattgtctaagcatgaacaatgccaggctggattgagcaaagccagctttggcagagacatacaaggagtttggagccctgacagctgatagcagcggcaggagtgggagaaggcaagatatctgctgggcccccagcctgggaggctggctgccagcccagggcatggccaggagctggcaagcaaacaccactgcggggagccaagcaggctgttcaggtcagggagctaggacagggttagcatgcagcaagctagacactagccagagcatgcaactgctcttggcagtcattaagggaggagatcagagttacaagatctggaggccatttcagacagcttcaggaagaagtcaagctcctaagtggctccttgacagaggctaggtcatcttaactcatgacaaatgtccgtgctcaatttacttggctctggcctcttctgatatctctctagaggttaaagggaaccatctcttttgtgcagtccaaaaaggagttgaaaaatcaccctcagtgcttcaagctcttttgcgttgggcagaaagcctgactgagactcagtggaaggcacgctgtcttcaggaggactcagagactacctgagagtggggaagcccgcagcctcttcttcctctgacagtttgtctatcaggagacttttttctcctgggtggcaacctgagtttatggaagagttgaggtttattaaatggacgtataagcaactacagactgaaatgttataaccattctctgagtccaacctccccaaattctaaaatacagcttgtttggtcagctgcttctcatactctctgtattccaaaattgcaaatggatcattccagtgccatctgaaatgcagtatcattgagagaccaaagagaaaatcgcatttgtgtgtgaaggagaaaaatagaattctaataatgaaattcacccaaatctatgtatgaataaaatggctgtttctcatatctaagaaattgataataaaagatgtacaactcaggccgggcatggtggctcacgcctgtaatttcagcactttggaatgctaaggcgggcagatcatctgaggtcaggagttcgagaccagtctgaccaacatggtgaatttctgtctttactaaagatacaaaaattactcaggcatgctggtgggtgcctgtaatcccagctacttgggaagctgaggcaggagaatagcttgaacccagtgggcagaggtcacagtgagccaagattgtgccactacactccagcctgggtgacagagtgagaccacatctcaaaaaaaaaaaaaatgtacatctcaaattgcaggaattataacctagagaatgtgtgcctgcccctgtttcctgcaaacctgcctcaaaagcaaccacgtgaatgctgactgagacaccccggtgaaccccagggccaagtgcttcccatgcttcccctcaatgagtccacacgagtctataacatagataacattgctaattcttgttttattctcacattaaagattagttgacttaccgaaggtcgtgcatttaggaagagacagagatgggatttggttccagacagtctgactccaaagactcagcgctttaatcattcctcttgtcaaagcaaaaattgcactgggcaaagttgaacaggcaaggaagatcttcattcagggctgttgcgacagggtagagaagccagaatgcagtcgagctcgcctccacttcagctaagggcaggagaattttgtttctttattttgattttttggttttttttatttcactaaaatacaatgggaaagtttttacaagctgggataggagggatcatagggtgtctgtgtttgctgattggctctacccaaaggaaaagtaaactttcacaacttggagttaggctcccaccctcccgtggaggggagacagggtgctattttccttgacaattaccatttcaaagagatgactcccaagtttttgaaaaagccattcctgggttgtaaaactggcaaacagctttttaaaaaatttatatctcaaaagggcagagaaagaattaacaataacaaattttctaaagtaagtgctcttaaaaagtgaggtcaggggtctagggtggaatggaggggtcctatgtaaagtttagtcaagctgaaggcaaagttcaggccctcttggtcagtctataccagcgtcccctgactgagatgaccctgtggcccagagggtatgtggaaaggtgcggtgacactgggtgctcccacagcttcccacaacgtgcaggagaatccatcccaaggaagatttgcaggccccacgtgcaataccggccccttgtggagcactctcccagttatggagtctatgggagagactgaagttgacaggcagtggtgaggctggacatcaggcagccctggctggtattatgcagattataaagtcgccatggcaaagatctaggcctgcagagggccactgtcaaacgcaaagggtttggtttaacgagaagttaatgcaaaagcactcttctcagggaatgagacttcttacttgacagtctctatgacatggaaataatgttttgtttttgttttgttttgttttgagttcctttggtaaagcttttataaagtcgtcaaagtcagcatggatctctaagtctcagacacattcttcggggctttgcagactctctcagcagcatgtctcctgcgctctttcctgaaatactttcttcccacagattccacagccgtgtgctgtcctgcttatttttcctaccaagctggccatcacttagtctctcctgcattccctccttcctccgcttgaccactaagcattgcagtgtcacagagccttcctgtcttctcatccgaatattgtcttggatgatctcattcagcccaccatccaatggcttctgataataatttgtgccaatgtctctcaaatttaaatctccaggcctctcttctctcaggaactctagatccacttatcctactttctactttgtgtttcaacttagatattaaatgggcatcttagaataaacatgatgggaaacaactcttgatgcctcctggaaatttgttcctccaaaagccctccccatctcagtaggtggcatcaccatctaatccacccatccaccctaaatttggagttacccttgatttccttcttccctttctttcttctctttccctcatcacttcctatccaatagtaagccctgtgagtctacctccagactgtccctcaaatgcagctgaggcaggagaatagggtctggaggcagggaagataggcagattcatgctgacttcttggaactaaatcaaatgggaacgcttcagcaatgacaggaaggtgaacggctgtgtagcttcacttcatcctctccatttacttatgccacacactgagtaacatccttgccatttacatagggtgcatactgagtaaatgactttgtcacttgacttcgtcttcttcatttacatagggcatataccaagtaaccaatgggaaacctctagagggtgttgaaaccccagaaaattattattattcagaaataaatgaatacgtttatttatgtgtcctccccctagaacgtaagctacatacagcatagacggaggatagggtccaataacaactggtcaatggttacccaataaatatttgctgagcaaacatctggatgaataaataagtgattgtgatttttctgggttaatatccatattcaaaattagatcatctcctttccaaagcaagaagggtttttccttataaactttctccagaattcttttctcaaaatgtgatgatatttaccatcttgggaaatatctttttactgggaaccacagactgaaatcaagcatgacagaagcagaagcagcaaaaaaaaaaaaaaagtcacagagaaagtcagcatattatggaagacagcatttcaaatcagtctagagcctgagcatagttttcagtcttcctgatatcaaattggggtcttgcctgtttggcggtagctgtgatgctggctgcaatcctaatgcagagtttctaccccaacctttgtaactagttcttggttctctctgggatagaaatagggagtgatgtcgtaattagaaaccattgccatacattaaagagtaaattaatttgctggacaaaatctagcaaaaaaaattactacattgaaatcaatcgaccatatgcaaagcaaaaatgcaaataaaatatagaagctcctccaagaaatgccttctccttcacagttgttcactacaagggttaccagccctctattcttttctgaacctgctgggccaccacgctcagtcggctgctatcttctcaatagaaccatctccacctacgacccccacaaagggcaaaggatagccccttcccacttacagttgccatgtatgttttctgccctttgccctttagggatcaaaactaattgacttttgcaattccagctacctttcagtcagagcattaccataggaagtgagtgatgataggtacaatgtttgcgctttttttttttttttttttgagacagagtctccctctgttaccaggctgaagtgcagtggcacaatctcggctcactgcaacctccgcctcccgggttcaagcaattctcctgccttggcctcccaggtagctgggactacaggcacacgtcaccacacccagctaatttttgtatttttagtagagataggatttcaccatgttggccaggatggcctcgatctctcgagctcatgatccgctggcctcagcttcccaaggtgctaggattagaggcatgagccaccaagcctggacaatttttgctttttttaaaatgtgctcccaaataatcaaatcaacagtgtacttttaatgtcttttgagctcccaactaactaaaagataatctgttaactatattatatgggtagaaactttacggtgaacattctgaacctaagaaactaaaggttcaccttctcatgtgtcacaagaccaaatgcttcaggaactctggtctttcttccaacatcctcatggcaattggaatggtctgatgcagagaagacattttaatgtaacggtaccacttttgcaatcaatatggaaaaatgtttttcaacaaataaataatttcttatacagattttttatctttccgataaggactgaactaaacttcatgataataaatggcaactgtcccacagaaaaagattgtaataaaataaattagtatcaatgacacaaatattgaagaagggatagatcctcgcagccccatagttcctcccacagtacactatgagcgtgagaaaaaagaggcccacttttagtattccgcattcagataaacagggtcgtttcccatcagacgcttccctctcatgtttttatctcacagtttggtttctgctccttcgtgttttcaaggccccctgatgtgcaggatattgcgtgggtctctcttcctttcatggtcctattgtcacatcctgacaatgttcctctttcattttaatttcattttattacgttttttcttcaccattgccagcttcaccctctcgccatcgccgacacccactgaaacgtattttatggatggtcttctagtcccaccctctatatatttgttcaaagtatacatatcattgtggaaattcgtgttgtctcttgtgtgccatgctttatatgggtggcattgtactacagatcccattctgtttcttactctcttccctctgccttacattgttaagatctatttgagtagttctctgaatactatgtgcatagtgctccattatgtgtatttaccacgcatcatttattctatcccctaatgatgaatacctaggttttctgcaactctgccaccacgaataaccctccagggaatatatttatgtgcattctctgccacctgtgtgaggacgtcttgtgtgtgtgtgtgcctctgtgtgtccccagaattactgagtcatagagtatgtgtgtacctaatttcactaagcactgcttgacctatcagtttctgagtataaattttaaactttatttactgaatttctatcaatagttctatcagtggtagcttcgggtaattgaagtctattttgctagttagatgtgttcatgatcttcttgatttattgttccttgtaccagtatataatttccatctttgttccttatgacatttttttttaaatctcacagttttgtctctgctcttaaaactaccacactgctgggcgcggtggctcacgcctgtaatcccagcactttggaaggctgaggtaggcaaatctcttgtgcccaggagttcaggaccagcccgggcaacatggtgaaaccccatctctaccaaaaaatacaaaaattggctggatgtggtggcacacacctgtaatatcagctacttgggaagctgaggtgagaggatcgcctgagcccaggaggtctaggctgcagtgagccgtaattgtgtcactgcattccagcctgggtaacagagtaagaccctgtctcaaaagaaagagaaaatgactacactagccaggcataatgatgtgcgcctatagtctcagctaccctggagctgaggcagaaggatggcttgaacccaggaggtcatagctgcagtgagccgtgatcacactactgtactacagcctggggacagagcgagaccctaactctaaaaaaaaaaaaaagaaaaaagataataaatgaacaaactactatgctagccttcttgttgttgctaatattcctgttataacctggtattttttgtacaggtgtttgtatccttttgtttaaatgttcctcttagatttcatattgctgaaccttttaaaaatccatttggaccaattactcctataattttgacttggcagtgaaaataaagatgcaatattttttccatctatgttctcaagacttgtgactcctgtacatggatcggaaggatccctggggctgggggtctctggttcagatccacagctattgatgaaggtgttgttttttggttttggtggtggttgttgttgtttttcttacctaccctgtttaaacacttcatgagtgccttccatttgaactctaatattgtttgttctggaaataccagatatttcttcagatagtttcttgcctgtgtttattcttttcttatgaagctactattgtgcagatgttgacacttctaccctccgtaattcttgacttttgttttattcttctaatctctttattcattcctattgtcttcatggaaggtttcttgacccaatatcccaacccacgaaaatgttcatcagctttatccgttctgccattcagcccctccaaggatatctttattttgacagttatagatttttcacttcaatatctccaactaattcttattcttatagtttgtcattgtcctgtgtctccaatatcaggaaggtgggattctgctaattttgctgccgcttcatgtcggcaccataacgcaggtgtcttttatgcaaatcctacagttttctgctgtcattggttctgtgtcttcagcgctgcttcttgcccttatttcgcagtgcttgctgtcctcagaggtcctgtcatttcgccttctgagttcaagcatattcccttgagatttccaaatgccacctttgttattgtcttcctacaatgaaaaacaaaagttcagggcctgcattgagctcctcctggaaagttgagggggcaaagaaaaactcctgcctcaggacaaacctctggcattgtcatccctctcaaccctttcttgtttccagtccatgtccctcacccacctcccatacacacacacaacttcagagtacctcactcccacctagacaggggacagccatcttccactgtcattgattcttaaaccagtggtgtatctataccactaaatctagcctctcactacccgttcctccactaataagcatcttattgctatattgaagtgtctgtctcaaaaataaccaaatccaatagcctgttactgttgtctgattttccttgacttcttgctcttatttaacaattgtcactgtgccctccttgaaatcttgacatcaaaacactccagtcttctgttttctcagcctctctgccaactcgcctcccttttcccttttcctcaatccccaagcttctcttctttttcctccacccctttgcttggatggctgacatacccatgaggcttggtcatcagagctacactaatccctcacggatccatcccaggcttgacctgggactagcatccgcaaaggcttgtatgtgaagtctgagagtgaagagaacagggtgccagcttggataataacaccagggattcttgactccggatttaaaaaaagactagatacaaatgtttaaatagagactttaaaagacagatggaagcaggagagggggagggggagatacatgaagatcagcagaaagaggatgcttattttacttcaaagatgacaaaactcaccagcaggacacttaatatgaacaataacctaaagatatttgcaaaaatgtatttagacaagagttctaggctgatatatttgacatctgggtttattaaagtttactaaaatagctgttaataattttgaaatttggatccaactagaaaatatccccactttcagatgcaacttggaactgtaggtcccacagtaaagcaatggcttctgaaatcagtgctgtcagactgagcttagggaaagtatccatcatccaccattttagcagtggccaaagcccataactgccttggtttcaaaactgtagtactgagcttttgcactaagaaataaatatgatcttaatgacagcatcaaaaaagtgtcttctctttgttggcttagagattaatttggacattgacattcctggctctgtgagtattgcatttcccctttcagcttcagccatccttgtagctttagagacaatggtctgcccaggtgcaggggctcacacctgtgatcctaacacttttggaggccaaggcaggaggagcccttccatccagtagttcaagatcagcctgagcaacatagcaagaccttgtctctacaaaaaaaaatttttttaattaaccaggcatggtgacatgtgcctgtaaccccagctactcaggaggctgagacaggaggattgcttgagctcaggaggtcaaggctgcagtgaaccatgattgcgtcactgcactcggcctgagccaaagagcaaaactgtgccaaaaaaaataaataaatataagacaatgttctggcaggtggtaaatgtcttgcctcaggtattaatcactctatcagcattttgtatacctaagtacaacaatgtctagaagcatatcagacgtaggagaagaaagtgccttatatgatgtaagcccaaaaatcaaacggtggccagagcatagtaagagtgcaggcttaaaagctatccagcctgggtgtgagttctggctacttactggctatatgacagcaaatgaattaactctcttattctcagttcactcgtctgtaaaatggagataataatatctagctctgagagtaaagttctggaatagtgcctgatacttctagtatttaattaatattagcttttgaaataaccaatagtttaccatgcttatcctgccaccatagcctctacaatgaatcagaccacttagctccacccccattgcataacatttcacatttggacacataggagtgctttatactatggaaacccagtgtcccttcagtctctattttgaagctttcttctagtttaatagtttggattcacatgttctgcatgtcctttactctgaggacacaagaaaatccatgcaataataatgaactgaaaaaaatccatcctattgatggagttatgaatgagcactcatgagtgtcatctgaaaaagcaattttccaaaccccagttctctcagtatgtgaaagcttttttcatacttgccctccaatatctagctgacagagaaactactgatcaatacttgtcaatcatgcagctctgcactaaagaatatggagcaatttcctttaactctctacaccactgaagactcttggccattctgctgttctcagttcaaccagataactgggtttatattttacacacctgcactgacaccacaggtattttgttttgttttgttttgtttttttgagacacagtcttgttctgttgcccaggctggagtgccgtggcacaatctcggctcactgtagcctctgcctcccaggttcaagtgattctcctgccacagcctcccaacaagctgggattacaggtgggcaccaccacacctggctaatttttgtatttttagtagaaatggggtttcaccatgttggccaggctggtctcgaactcctgacctcagtgatctgtctgcctgcctcggcctcccaaagtgctgggattgtaggcataagccaccacacccagcccaccacaggtttttttttaacgggttcaagttgatgcttcagacctaagaaacaatggtagcatatagaacaggagaaatagcaggtacagaattgcaacttgggaaggcccagcctgcccaaacacatagctgcttttgccccctgacctagccagggcagctgtggctgccatgccagagagccaaggtcagggtgggtcacctagacacagaggagtcctagctctttttcccaccagtcactcacaccattccagtggcgggctcaagacctctatgctaattcacagctctccagtccagacacagccctccacgaatgataagatagcaacgacacccatcctaactctgtgctttcttttctctctctttttttttttttttttttttttttttgagacggagtttcactctgtcacccaggctggagtgcaggggcacagtcttggctcattgcaagctccacctcctgggttcaagtcattctcctgcctcagcctcctgagtagctgggactacaggcagatgccaccacatctggctaatttttgtatttttttattttttattttttattttttttttagtacagacagggtttcaccatgttggccaggctggtctcaaactcctgacctcaggtgatccacctgcctcggtctcccaaactggtgggattacaggcatgagccaccatacctggctctaactctgtactttccatggaaacagtgcagtgagaagagggaccccaaggtcactttctcagggaggtctagatcagcccgagcctgataacccttcctcattgtcttggtctgcttgggctgccctaacagaataccatagtctggtggcttaaacaataaacattctcacagttctaaaagctggaagtccaagatcagtgtgtccgtagggttgctttcttctgaggcttctcttcttggttttcagactgctgtcttcttgccgtgtcttcacttgatcttttctctgtgcaagagcatccccagtgtctgtccctcttcttacaagaacaccagttctattggattaggtctcacctttatggcctcatttaatgttaagtacttctttaaaggtcccatcttcaaatgcagtcacattggaggttagggattcaacagacaaattttgaggggacacagttcagtccatagcactcctgatacctctagtatcagatttatatacacatcatctcagccatatttaatttattccaactatgtgcttctatagaatgtgcctatactcaataatagcaataatcgtaacagctaccagtaactagaattagtgcaaagaagtgcattatctgttattaacacactcctacgcggtgcatattgttatgccaatgccacacataaggagactgaggcccaaataggacctgggaagctcacatgccatgagcggcgaagccaacacatagaagtagatctttgtgaccacagttcatgctttcttcatccctgcttgctgcctcccatacatcaaattgtgcctggcatcatcgtgcagctatttgtgatcaccttgggattaacctgcaggcaagaagcacgtcctcatcatcattttacaaatggctttcctgacgcctttcactcatgaactgatcatgcaacagctttgctcttctgagcatcctgcaaccgctctcatctcatgcctccttcccttccaacaggcctcccctacttgcaggatggtacccccttacctttttcctgaagccctctctccatggacgagctcatgatcccctttctgtcacttcctcagtggggcctatcctaaccaccctacttgaaattgcagcctcccccaccccactccaactctggatcccagctaaccctgcttgacttttttctccatagtggctaccaccttctaacacacagtatattttattttcttattgagtttgttgttaaatttctctttctgcctgcaagaatataagctctacaagaacagagacttttgtgtgttttgcttcaatactatgaagcagacaaacaaaacatctaaaacaaggcctggctcatagtaggcgtgaaataaatattttttgaatgaataaattagattttatgtgtgtgggctttagtgtgattccttctatggtgaattagtggccagtctctttgggcaaaagtactcaggaacccaacttagctctttattaagttctgaatttgaggacagtgtttttttttttataattcctcttgatcattgtttttgccctttttgtttaatttaatagccgattattttgtcccagtcttctgtgcattttacagttgtattattcattatgggtagttccagcattttcataattaatctttaattgcaatacttgcaaagcatttcacaagaaaaaatgatttacaaattaaacccacatctcaccttggataattatcacaggtctgactaatgtgcgtgaagcccttgcatggcagggggctctctacaatgacaatgtgttgattttctaattaacaaaggttaagtagcgtttttgcttgaagacctataatttaaacttatgacgtttgtcaccaagaaagatttctacagagcgcagaagtggaactcaaataattttcactgattctagtgcattaatgtcttttacataatatataatgaccgttttcaggacagaagatttttcttcatattgactagatcaggaaaagtaccttctagctcactgtcccatttaaataaatcagggactacctaagcaagaaaagagcctaatttatttagttttcctttatagagcgagaaatggcatttcactcacctgctttataaattatgaagagggaggacaaaactttttatttatttatttatttagagacagagtttctttcttttttgcccaggctggagtgcaatggcatgatctcggctcactgcaacctctgcctcccaggttcatgccattcttctgcctcagcctcccaagcagctgggattacaggtgcatgccaccacgcctggctaattttgtattttcagtagagaagggatttcaccatgctggccaggctggtctcaaactcctgacctcagatgatctgcccgccttggcctcccaaagtgctgggattacaggagtgagcaaaactttacttaatgaacacaacaaatacaaactagactacagtcatatgttacacccagttaaaagagggagaaaaaaaaaagtcagacatcggtgcaaagaaagaaaaagcaagcaaggaagagatttaatagaatttgagagtgtttactgaaattcagaaaaaaagacacaggcccagagggagagcctgtgaaccgtgagccagagtaattcagagctggaaggagtcacagacaccatctagttcagcctcctttatctgtggatggggaaaccgacgctgagagagactatgtaatttgatgaaagccacacaactgagtagaaatagttgatgatcctgagaaggaaagatccacaaacacaagtgcaggaagagagatggatccatgtagaacctaagaagtccaaagacccaagaatcaagacagaagcagagggagaaaactccgccccactaaatcctttctgaaatgaaccctgtatatataaataattaagtatccatgaatagatctaaatatctgccttaatgatataataaaaatatgatttactctagatttatttgctctgccaattgaccctttgaaaaatatctccattctcaatcattaaaaagtcaggaaacaacaggtgctggagaggatgtggagaaataggaacacttttacactgttggtgggactgtaaactagttcaaccattgtggaagtcagtgtggcgattcctcagggatctagaactagaaataccatttgacccagccatcccattactgggtatatacccaaaggattataaatcatgctgctataaagacacatgcacacgtatgtttattgcagcactattcacaatagcaaagacttggaaccaagccaaatgtccaacaatgatagactggattaagaaaatgtggcacatatacaccatggaatactacgcagccataaaaaatgatgatttcctgtcctttctagggacatggatgaagctggaaaccatcattctcagcaaactgttgcaaggacgaaaaaccaaacaccgcatgttctcactcataggtgggaattgaacaatgagaacacatggacacaggaaggggaacatcacacaccggggcctgttgtggggtggggggaggggggagggatagcattaggagatatacctaatgttaaatgacaagttaatgggtgcagcacaccaacaaggcacatgtatacatatgtaactaacctgcacgttgtgcacatgtaccctaaaacttaaagtataatttaaaaaaagaaaaatatctccattcttcatcatgttaacattcagagtcttttcaaactctcaatcattgctgaagatccatgaaataccaattgtttccaaattaaaatacatcccagatagacaaaaggttaacatgtggagagaagcaaaatcacaaacatgttagaagaaaatatggttgaataatcatattattttgtattgtagaaggtctttataagcctctgaccaaaggcaggaatcacacaaataagacaggtggatgtgactacaaaaacatgcaaaactttcatcgggaaaaagaaacaccatagagaagtcaaaagacacaaactggaaagatacagctgcaataaagagttatttataaccaagagttaaagctcatattgttattaatcaataagaaatatattctcttgtattcccagcaaaaagcgaagaacacaaagaaacaaaaaataagaaaagggaaaacattaaaattactcagctcacagtatttgaggtgatgcagatttaaacagtgaatcctttttgcccccgtcgagcagactggcatgaatacaaaaaggcactgaccaatattagaattgtgtggagaagatgaaaatctcataccctactggtgaattagaagttggtaaattcttcttagaagaaaacatatttaaagtgcctttaaaatgtatatgcccttcatcctagcaattagacttaaaagtatgattaactaattttaaagaatgaattctaaggaaaaactggacgacaagtgtgcaaaggttttcataaagattatattattatagtatcatataaaatggaaaattttaaaaacttaaaagtccactggtggtgcaagagcgaaataagtgatagtgcattcacagaataggatgctatgcagatactaagcaagatgttctcgttgtacatttattgcttggaaaatgttgcaaaggctgggcacggtggctcacacctgtaatcccagcactttgggaggccaaggcaggcagatcacgaggtcaggagttcgagaccagcctggttaacatggtgaaaccccatctctactaaaaatacaaaaattagctgggtgtggtggcgtgtgcctgtagtcccagctactggggaggctgaggcaagagaattgcttgaacccgggaggcggaggttgcagtgagctgagatcatgccactgcactccagcctaaacaatagagtgaaaatccgcctcaaaaaaaaaaagtttcatgatatgttaagtgcaaaaagcaagtttcaaaacaatgtgtatattatgattccatttcttcctttttatttacacatagtatgttcatagaaaaatgaaaaaggctgttccctaaaagtgaaagtagttaaatctgagtagcgtaacagaatctgttttgtattctgcttctcagtatgtttatagtgaccacaatgactattacattgatcaccaggcagaaagagatggggagatctaaaaatgatttctacattttagcatattttgatagaatataattgtcttaattgactagtgataaaaaatttttaaggccagacatttatttaataaaatgtcttttggaaagcccttattgcaaggacaaaagccataatggctaaaataatagaagccaaattgaaattctaacacacaaggtgtaactagagggttgaagttcttccaaatcaggcaaaggccctcattctcttcagcgtagaggtgtgaagcccagttgacaaacagatggcagaatgggaaatccttcaaagtagttgtttttaataacttcttttgccatctactctctcatagctttgatcaaaaaaggcactggactctcttcacttctctattccaatatgttagaagaaatcaaatactcccaagggagtcatgattaaaaccaatgagtcacccagtgagagaactgcaaggcttgggtttgcagagatggtacagcaactcatttgccacttcactgatggggttttgcaggcataagcagatgctaattcatctctgccactaaagcctttgatattccagtcctgtctgaccaatctactggagtttatgacttttcttaagataatagagtaagtgatcagaatcaatccccagcctactgatcttacctgaattccagtaaccctactgactactccatgtttaaagacctccaaatctacatctcagaaacatgtacatctatgagacccctgactggaaagttcttctcggtattaagtggtctacacagaacagggcttaagacaataaaccctgtttgttgccttaggaataagacagatctgatacagttgccactcaggaactatgagtccttgagtaaacttcttaacttctccaagcctcagtttctccatctgtacaatgggaataatgcaaataatatctactttgataagttgttgtgaggaccaggtgagtagcatatataaggtactgtatatagagtgcctagtatgtagccctcaatgaaggagaaacttgggttttatttttattaacagtattttcttttctaaatgctcatcacctatttctttcaacagttttacctactattcattttagattagtttccagaaaagttgttactctaagatgcaagcatgtatataaatttgagttcgtccttttataccagctgctttaaaaagattatagctaagaatactatagacacaattaaatccatttgtgatagaatgcctcaatgaatctttctgtgaaatttcttgggaatattttaatattttcatgctcatgaacctcagtccaactctataacttactccaaaaatcacagtgaacgtgcttattgtgctatatgtcgtgtaatgacatttagacaaaagcaatgaaatctgatctaacctagcaataaatgtggtatagctgatttctgtgtaaagttatcagttccagcttccagctaccccagacaaggagccttgggtagtcttgacatgaacttaaaagcaaagcctctcttgagacaagaaccaagatctacaatcacatttcaaacggatttatgtcttccaactaattgacttgttaactatgctaatacattcatgtctctgcctttatattttttcaataagtaatgctacagaactcgatgttgtgagattaaagagcaaagaatctagagatttctgtaaacgctttttctataggaaaccagattagacttccaaaacagctgatataatttttgtgcatctccaaatattttatttctgtaggaaacgtgttgcttctcagaagatggctcttttaattaggccttatagcctgcagggagaaaagcttcaactttctctatttagataggaccaacttgatagtgacaatactagatgtgctatgcagtgtcatctcctaccacagttgttcaaaatatgaagaattaagcaatagcagaggttattccctctgaactctgtgccttctgtcattcccaggtggtgctgggggccagcagggcttcctgggctgcatccgctccttgaggatgaatggggtgacacttgacctggaggaaagagcaaaggtcacatctgggttcatatccggatgctcgggccattgcaccagctatggaacaaactgtgaaaatggaggcaaatgcctagagagataccacggttactcctgcgattgctctaatactgcatatgatggaacattttgcaacaaaggtaaggtggaacccatttccagagccacttttgcgtgtctttttaagcccaaatcatctatttaatgatttttcatatgtaaacaagtgtaccttattctgaggttaagatgatcagaatttttctctcaacttaggtaggaattttccaaccaaaatcatttcctaatcatttttgtttgataaaatgagagaagctctgtgtatggtgcagaatttcttccagattctagcaaattattcactgcccgaaacactacaaaggcagtctcattacatcttaatggtgagtgataaaataggtggccttcaaaaggggaatcaggcctgaccctcccacgttaggatctccaatagatcaattgatcagtcaatttctgtagtgaatcagccagtgcaccccagtggtcttgatgcccccaccccctgcagttgctaagagactggattcaagctacactcaccagaaagctcctctggtcagtcattaacatcattattattactcttactcaggatgcctttgagtggctctcagcctaagctaaactgcagaaatgctgaaaaaccacatttaattggtcagcttagagcatctgttattacttggttattttagtcttgaataattcctttaatccccagtagattccgcagagccaatgagcagagtacaagagcccaatgcatatgcatgttatcatttgaactataccctgtgatcctgcttgaccagaagaagaaattgactcaactggtctgtggcttaatttcccatatataaatgagggatgaagagaggaggagctggtgcttttcctaagccacaattgaaatgcatgtaaatcactcctctctttctaaatgaatgtatagcatatgggtaaagttttctgtgagcggttggtgcatctcttaataagaagctttacataagtagcctgttcagactctgatgaatacatggagggttgtttacactggcattattcacacaagatgccacacacagaaggaggaattgttccataacattctctgtacctccaggctactgtttggcagcgctataatatgagcatacaaattaggccagacagggtatgaaaaatgagcatgagacaacaacaaaggtggaaaggaacaccattgcagaataataccaaagcacattaacagtgctattacagtgcatttttctgttcagaacaacatggttccatgattttcctgcggcacacaattgaatgggcctgcagaacacattaattttgcacttgtagaaatgacagtcttgcaattaccattcattgtgcttgatgctaatttaatgcagtcatttccttgccaaagtaatgtctgaatgcaatcaagtaagcactaatgcctgcgagattccactacataagtaccagtttaaagaaaatcaccatccctttatttttggagagttaggttaaacacagtagctcacgcaaaacctctggagattaataggcaatagtcatgaatagaaaggcaggggcatatcctctccaggttaggccacattgcagataaagtgaaatgacgcctgtgtgttgcctctgacattatttcaacatgtttacacaaaagacatctaaatatttccttattatctgtttagcagaatgagttttcatttgattcaattagtgactttaaccaaaaaatttaaatagaagactgcaaaacatatttggaaatcatttatgagcatccttctgagtcaagtacctccttgacttggtagaatgacagtggaactgtttcagaggaatcccacagctgtccaggaaagctttgtctgcactgaggcaagctccatcagggactggaaggatctcccagcctgatgctgtctctgctctggacctcactctccaggtagcctggtgcctgcacagcagttcctgtgaccgccccccacctcaggctggtgcttcagccaaacagctcagcctctacaaagagctttggcattggccgaagaatgagctccatgcaaggccttctctggccttcctttgggagtataggtctatgcttgcagatgtggaaaacatcgctaatattttgccaagtgaatgaagcaaggcccaacctaccacacacagccggactacgtgtttatacaaaataaaacatgcatacacgcagagatgaggcaaacaaactgtgagaatacacgccaaaatattaactgtggttattttttgcaggaggataaaaatactagtattttttcttattttattttgctttaagttctgcgatacatgtgcagaacatgcaggtttgttacataagcatacgtgtgccatggggtttgccgcacctatcaacccgtcatctaggttttaagccccatatacattaggtatttgtcctaatgctctctctccccttgccgccaaccccccaacagacccctgtgtgtgatgttcccctccctgtggccatgtgttctcactgttcagctaccaattatgagtgagaacatgtggtgtttggttttctgttcctgtgttagtttgctgagaatgatggcctgtagcttcatccatgaccctgcaaaagacatgaactcattctttttacagctgcatagtattccatgttgtatatgtgccacattttctttatccagtctatcattgatgggcatttgggatggttctaagtctttgctgtgtaaatagtgctgcaataaacatacatgtgcatgtttcttattttgtttttgcttagctacattttccagtctttgcacaatgatgtatttcctctaacatcattattttttcttctttggaaaaataatagtaggaagccaagttcttaccccagacatttgagggataactatctctggtcataaaatatctagctatttattagatattattggaccatctagttgtactttctggaatggagaagcatggtcaggtgaaaattttatgtaattatattgtccctgagaatctcaatacatttaacaatgcatttgttaaatctcaatacatttagcagaactcattttccacaagcagctgaagagatcacccttcagatgggcatcggaggaagggctgccttgttggggtcaggttgcatgaaaataaagacctcaagacactagtatcacactcagctatgtgagaggctcacactaggacaggcttgggacccaaaatagcccaggtcataaaatagcccagggggacagataagctaagtctcacccctgtatattattagcccatccaggagaatggtgggcagacagcccatactgtttgaattctgtttttccctcctctccttctccccctcctccccatcctccttatcatcctcctcttcttcccttctcttcctccttccttctccgttcaccataagcacaatctttatttctacatcaatccctgtctctgtctctgtctctccatattccatacctactttccctctctccctttcttttgctggagtgtatagttgaatatgtaagtgaaattaccgtgtcttgtcactttgttgaactaggaagacagggctggatttgagtaggttcctcatgatcatctcttctgctttgtagatgatgcactgatactcactattccgcactagtcaaaaccacacaagaaggggacttcctctaacctcttatccaaaacccttttttcttttctttctttctctttttttttttttttttttttttttttgagatggagtttctctcttgtcgcccagactggagtgcagtggcacaatcttggctcactgcaacctctgcctcctaggttcaagtgattcttctgcctcagcctcccgagtagctgggattacaggcacccatcaccacatccagctaattttttatttttagtacagacggtttcaacatgttggccaggctagtctcgaactcctgacctcaggtgatctgcctgcctcagcctcccaaagtgctgggattacaggcatgagccaccacacccagcccagagccctttttcaaagagatgcctaaagatttgaccaccagttaaagtgttagctctcccagggctacttgaatctttagtaggagtgctgactggggaatatttcatggtttggagatagcacaagggcgttgtggaaaccctacaactagaccatgcaggcagtctcctcatctgtcggcagataactgagcagcatcccatcttctcagcacgttcatcaatgaggagcagtttaactcagtggaggtaggtcccttccaatgcagaattccttggcaccccatcggctgaggctgaggggagaatcatcccagactacatggaaggtttaactgtgggtctgtcatccccaggattattggggaccgaatggatagttgcttggtcatgccaaagatagttttctaacattaaaactgctccttcttggagagtcagatcccaaaacactcaagaattctataattatcaatgtcacttttattactaaccagaaattagagacataatttgcagtacactctctgtgtgtcttctctgtgtgtttaagcaagagagaaaataacatacctatagtagaggcagcaatttctgtgtttacttttcgtggttgaatgccatagtagattgaatagtgtcccccaaaattcatgtccacctaggacttcagaatacaacgttgtttggaagtagggtccttgcagatgtgattatggtaagttgaggtcatactaggaggttggccctaaatccaatgactgtgtcttcataggaagaggagggggcacagaggtactgacagacatagaaggaaagccatgtgaagacggaggcagagatcggagttacactgccccaagccaaggaattcctgaggctaccagaggctagaagagtgaaggaaagattcttccctagagttttcgaagaagcgtagccctgagaacaccttgctttcagacttctggcttcctaggaaaataatacaagttcgaagaaaaacctaccatcttcttaattcttgctcttaacaaggatagcagctggtatttattgagaacttgtctgctaggcagtgtgctaagctttctaattgtgttagcatcgtttaatcctcaccacaacctggtgaaatgattgctattactagtgctcctattgtaccaagaaggagatggttgtagtagcctgccccaaggttcacatattagtaagaggcaagactccctttcctttcattttgtagcaactaaaagcatagcctctagtcttaaagctttttgattattgtgattgagtaaaaagaaattagaatattactggatgcagagtttatcataaaaaataggatacaagaattgaacagacactgtttttttttttttgctacatctaggtgtaaggtttattcatttattgactcttattgagcaaacattcattgaacacctaatgtgcccagaagtcttgaatgtatagttgaatctgactacactgaaatttccaaagcattttaatggtttacagatacaaaatcaggcaagtctagaatatatgataggaatacatgtgaattggatatcacccaggctgctgaaaacagttcttcattatgatcctttcaccaagccaagttaagcaagaacttatcatcaagagacacaaagatatctccaaattcactcatctgcactttttttaactataaaaatgttcatgttcatatgccaaaccaggactgcagttgaaaaatacatttctttaatcactctgaaaccattttctgagttagggagttctgttttcttctcaaacattcatttgtttattgcttagaaaaaacttgaagaataaaagtcacaggattactgagtgaccaagatttgaatagtcattcaatcattgcagtgtttccatcatttacagtcacacaaataatgtgccaccctccctgtgttccagctaagtctcctattctccctatgagtattgtgaagttagctaatattttataatctgtattattaagatggtagaagaaattgtttatagcaaattcaagtctcaacctataagatgatgatggaattagatgtcagtttgaatccatctttctcacatacctgttacgtaaccttaggaaaattgtttgtcactgagccttatcttcaggaatacatagtaactacctcttaaggataccttgaaaatcacacagaataatgtgaatgaatttccacatgaaggacctggcacacagcagtccaacagcaaatgtccttttcattcttagcagctctttgctttttggtttgtgtttttgtttttacttaattcatgttgtcctttaatccttccctaatagctttaaatgtcaaatgcctaactggcattatttcggtgatccttgagtattggattgtcatttcggtacttcaggagcagtggcagtgtcctaaaatgtcatttctacttaattttggtcacagtaaaagtattctgaagccctgaagggctgagaagtatgcagagattctggaagatgcaactggaaaccacacccaccatatcggactggttttgtcaatagcgcaagtcttggagcaatgtatccagtcctttcaagaaccaagttgggtcaccttagtaactcctgcatcccttcctgactcaaggcccatcaggagacaagaaagcgctgattagccaggcacactggctcacacctgaatcccagcactctgagaggccaaggtgggaagatcatgtgagcccaggagttcaagaccagcctgggcaacatagtgagaacttgtctctacagaaagacaaaattagccaggtgtggtggcacatacctgcagtcccagctacttgggaggctgagatgggaggattgcttgagctcaggaggtcaaggcttcaatcagccgagattgtgccactgcactttagcctgggcaacagagcaagactgaggaaagaaagacagagggagagagggagagagagggagtgagagagggagagagggagagagagggagagaggcggggtgcgggggagagagagggagggagggaaggagggaaggaaggaaggaaggagagaaagagagaaagagtgagaaagagagagaacaagagagagaagagaaagaaagggaaagaaagaaaagggaggagaaagagggagagaaagaaggaggaggagagaaggaaggaaggagagagagagaagcagagaaagagaagaaaagaaaagaaaggtcccagactcctttttgctccaagagacctcaggctcaagtccacgttatacctctaaggaagagagggttttccacttgcctcctagagaaacatttcttgttggatgtgaggtagtgggtttgccaaaagcggttggaagactgaacaaattctgttccacagctctcagtatgaaacagggaccagaataaatgcatggtctacccttttagagcaggttggagagaaaattaattaatacaaaatatataaacaaatagggagaaaaagaagagaaatgttggaagtatgcatcttagaatttcacccctatgtgaaatcagctaagctgttagtgacaatggccatttttcctcaggtctacctatccagtcttaataatcccagcttggaagacactttcacatcagtagggagagaaacttttcacaggcttctttttcattttcagttggaacaggaggtttgacagatttggaagaaggcccaaaggaacaagaatagaaccctttttttttcttttcttcttagagaattattcaagtagagaaaatatcccttctctcttaatgtatttcttaaatcttcagaccttaggatgcaatttaaaagtatcatggtaactgtgatggttaattttaagtgtcaacttgactggtgttccatagggagcaggtctatgcaagcctacctccaaaggccaagggagctgagaggccaaagaaacagtctgacaaagccagtttctcagaagaaaaaaaaaacaaattgaatagggacttaccaacagaagttgcgtctctggtatctacaagatgagatggtggattcctttacctcctcagacccagggcctatataccatagagaaagggtctacatgcttcagaagcaagttaccctagagcagaatttgcagtaaacagtagataaggtggaaaacttagtggcattctgcaactgggttattcagaagccagcatggtgcattagcatccaagaaggaggtgctttagcccctacacctagaaatctgtaaagcattactttgaggtgggtctgtgaggctgtttccagagaacattagcatgtgggtctgagtggatgaggtggggaagagctaccctcaatgtgggaaggcattatcctgtctgctaggggctgcagagaacaaaaacagagaaaaggtggtagtgtctatctatctactagagatgagatatactgttttggggcaactccaggctccctagcctttgggctccagaacttataccagattctcatgcttttgagcttgggctaagagttacaccattggcttcttttgttctgaggcctttggacttggacggagccacaccactggtaccccagggtctccaccatgtagaggacgtatcatgggacttctcagcctccacaattacatgagccaattcccctaagaaatcccctctcgtatgtctatatctatatagtctgttgattatgtccctctagagagaaccctaataccataacgcatgaaaataatctgattaaaagcttaaaaaataaagagagaaggaagagccaaaaagtcagaaaatatttatggatgaaaatccataagtggacagaagtccacaaatatgtatggaaaaagaaaataattttgacttaattcagaaaagtcaaagctgcagagatagctgccaagtttaagtggctttgttatagaattttgtggtggtaaaataacattccccctagcctgaggttctctttggggtcccagatatttgagaaaacctggccaattaactttcttagagaaagagatttaaaaattcagtgcagaaaaagcaagtcctccgtaaactgttctaaatctaatacaggacaaagtgttcggatttggctttggttgtaggataaataacttttgtttcaagtgtgtgcccttttttttttttttttttttttttttttttttttgagacggagtctcgcactgtcacccaggctggagttcagtggcacaaactcggctcactgcaagctccaactcccgggttcacgccattctcctgcctcagcctcccgagtagctgggactacaggcgcctgccaccacaccaggctaaatttttgtatttttagtagagacggggtttcaccatgttggccaggatggtctcgatctcctgacctcgtgatccgcccgcctcagcctcccaaagtgctgggattacaggcgtgagccaccgcgcctggccaagtgtgtgcccttttctaatccccaccagtgtggggacacagctgaattttttttcctgagtgttttatttgtatatgttgttgagtgtttttatttcctgttcttcagcaatgatcagaactctaaataatgtgaagttcacagaaataacactctttatcttttcccacatattagctccatgacttgagctgaaactctatacatttcttttcttttcttttgtgagccaaaaaggaactggtctgataaattgtcctgagggttttgcttttagattgctcacatgtttggctgccctgcaagcaggtccattcaccaacgtccacgctgcccttgagtactccatcacgtctatgggccatgaagacctgcctctgacatgcaatttcttcactccacaaccatttgcgcgcttatcatttccaacaggcagctctggccttagcaactgggctcattccaggcattccttggctacaggaaatttactttcttaaataatcaagcctgagactataatgctatagcctacccattttatagatcaacctggctttgaactcactcacatatttttacctctattaattccaactggttacaagagtgtttgatttagataaataggcattttatatttttctgtttaaaaccaaatcctgagaaaacaaattatgaagagccagctgctctctctgagccatccttttcttggcattttaaatgtattaccttcattttctcaagaggactgggcacaggatatagtgaaatgtttaacttgactaacaatactttctagctactcttccaagggatatgtttactaaatataaggtggcttttacagtattcaagttctataaggcaaagactctcaattaaattaaattattggcagtacaatttaacattctacattctgtgtgaacgaagtaatttcaagcagtttgatcattaataataattttattccttcctatacactgagcacaagtttagtgaaatacgggaacatgtacagagagcctgctgtgggggaagcagtggattgccagcaaggaaggacaggatgaataagactaggctgggaatgcaatggaggggatagaaccaactgcagcatgcagggaaacaagccagaaggccgagtgagagacccccatggatacccacgctgaaggttctactgggagggctgcctgattcaaagtcttgtccaaggacagcatggcagatagtggtgggttgcacctaattctgagggcgtaatttgggttaagggagaagactctttggaaaacatatatcattaaagcctaaagtctaaagacaaaagttttaaagcatctcaatttttttaaaattgtctttgaaataatacaattgatatttacaagaaatacttatttgctttttttttttttttttttttttgagacaggctttgagctttgttgccctagctggagcgcagtggtgcaatgatggctcactgcatcctcgacctcctgggctcaagtgatcctcccaccttggcccccagagtagctgggactataggcatgtgctaccataccctgctaagtttttaattttttgtagaaacagggtctcactgtgttgcccaggctggtctcaaactcctggcatcagggtatgctcccacctcagcctcccaaagagctgggattacagtcatgagccaccatgcccagcctacttatttgcttttaatattacaaaattgaattgctttagacattaatagtggacaaaatattttaggagttagattagcttaactatttttcaaattatattccaccagccaaaaatatttcatgaggctttgccttctttaatttctaatatgaaaacagtagggaattttttccatttttcaaaaagttattctaataattaatatgattttctcaaaatacacgtctccttgcagttttttcccttactcccacctccagataattttatatgaacctagtggacaccttccccttgagtatttctgccttaaagataactttaaagatacaacttcaaagatagatcaacaaattgatatgtaaaccaggcacggtggctcatgcctgttaattccagcattttgggaggctgaggcaggattgcttgagcccaagagtttgagaccagcttgggttacacagtgagaccccatctctataaaaaaaataaatatctaaaaataaattgacatgtaaataagtttatctttgctttttgttaaaagaggtcttctaaaaacttgcttttatcaactttaacattactaaattttattttagtattctgaagtttagaccttaactaatgcaaatttgcttactttagactagtacaaatgacttatgatttacctgtgccagtagccaatctcactttctgtgcttctccctagggagttgggtcaagtatagcttacagagaaataccaaattctagcccttatgtgaatcatttctcagcaatcctcaaaggcaccaaaatgtcctttcacatcttctatttctttccatcctggatttatgaccagaaacacagacaacactattctaaactaattttgtttaaagaaaggggaaatttgtactttttgagtttatcccaattaaagagggaatcttatattatatagaacagtggaacaagagtaacttgaattccaatttcaacattattaaaaaccaaagtgaacaatcctaactaggcattctgtttctttataaattgcactaattatataaaattcattattcacaaggctgtgaggatcaaatgagctgatggatgtgaaagtgctttgaaaagcattaatgttataaaatgcaaattattattaagtttattaatcattgagtcactgaaagcctctttagtgagaatcctgcaaaatgtaaaccattatctttcaagagctgctaggaaatcctagacagaacttttctatctgtgttgttagtgttgccataaccaacagcaaaacttttccctctcaattgttgacattagtgctcgcccgtctctctgtacagcactgaaatgcgttatccagaagctccgtgctcacaacaatccagcaagactttagacctcagagttatactagttcatgacaggcagtactgtattcatagtcagccaacccttgaatgcatggccctgattaaattcctgtctctgtcatggaattggcatgagtcatttggcctggaacatcattaaagcagcaaacacacttgagattaaataagaatggattctaaaacatcctcttgaggttgttattgagatcgttagcaaatcatgttggttccttgagtatcttatagagtttcaagaaataaaaagcaactgctacattgtagaaagtacatctaaaattttcctcttatcccaagtgattgacagtctctctgcatcctctgccccgttaccaaggatgataactcctgttcagatgaatgagtccagatttttctcaggtctaagccaaatgtaacccaaatatttgaacaagtccattgctagtcactttttagttttcagagatgaataaagctataagtaaaatgctttctaaagctttactattgaagtaatttgatttaaatcccttttaaataggtctattttagcctgttgacttttatatttccttaacaaatgtctcttataaaggaatcttgtaaattcagttaaaaatataaattaagtcatgtaagtcaaattaaagcagtagatcaagttataaattgaaacaagtttataatccctctcctctattaactaagttaaaatgttatcttctgtggcctcatacaacaacctcctgaatcataaaccacctgaggttatgacaaacacttaataacttcttttaaaatatcaaggactattccaaaagacttttatttctgttactataatgaatttatgattactcagactttcagcttttgcgctaacattcaaatgtcattgggttacttattccaacacttcttctattactatagatggttaaaagttcaggaggccccttttgtcacaaaatcaaagtatgtcgtggttgaaaggactatttcattcattcatattcaactgatattttattaaacatttcctgttatgccaggcactgaactaagtgtgttcacatagtttaccttatttaatcatcacaacaacattcaggcattgatatgatcacctttatttacaaaatgaagaaacagagacttctagaggttaagtttatcatccaaaatcacattgctagtaaatggcagattgagattggaatcctaggtccctgactccaagcctagtgttttttccaccatatacactagaatgatgtcctctttataacacactcactggatcagatccaagttgtgttcatggagagcccgggaccacatgaggcagccctcttcctatttgagcatttcagacaactggaaagatttccctcatcctgaaccatcatctctattaaagatggagaatgtctccatgaagaaacagtgggtgtctggctctgggttcaaattcctgtgcctgtaagaactcagaaacacctatgcaccttcaaaatccccaactctgtggagataaggaagagcacctggcctaagtttgacacaaaaggggtatttaatagctgattcattccttactcttctgtttcctttaccaaagtctcaatggcccttaaaactaatatgctgacacacggtcagtggtccaatttgctatggctattctcccaatgccccaggaggccttgaaagatattggccttgcttgttgtccaatgtagaatggtaaattaatgagatccttggataccagataacacagcttgccctgtgtgtcctctttctatcttatcaccctgatgactcagggcaggcctaagtcctaaaagttctgaagaagtttcccttctttctttgccgttctttctgaggccctctctgtgcggttgagcaaggaaacatacacacacacacacacacacacacacacacacacacacaaacagagccaggtgtgagctggacctgtcggtttctaacaataagtcttagataacaagataattctttgtgtttcttagggtgccacccacacaccgtatccatgcttttgtgttaatagcagagacttctctttctgaatatatgaggagaggaataaaacaagggatgtgaccaaataaattcttctgacatgagagaccactttagattgccttattacaaagaagctgatttgcagggtaaacacaggccatgccctgtaagttttcttattgatgaaattcatgctttgaattactgattgatggttgctgaaggatggcaatttctctgttccagtctggagactgcgctacgtaaaacgagcttctgatgatggaaattctaaaatccaaacaaaacatggaaacaattttttaaaactcgacatctatttctatgaggagctaggagggtggatgcaattggtcagctccagctgtttccttgcttttattgcacagttgttacaaagaggaattcagtgtacaactatgagcttccggccgctcaagctactgcattacactacatggccatactctgatcccaacatgagctttttttcctctagccaaaggataatgtaaaaattatgacacaaataaaatatttatcctctaggcatgagtaaaggaattcacaaatcagaacatagcttgcaagcatacaagagtatgcttgagcagtcccctctttttaataaaaatcaaccatatgaataaaaagctgccctgccccaacttcaccccctacccatcacagaccacaccaccaccccaccatccccgcatacatgcgtgcacacacatgcacacacacacacacaaagccacccactaccattgcagcagggaatcactgatttttttaaattaaacttttagagaacccatgagtttagatggaaaaaatcgtgggagagtaggaatagtttaaggaatgtgcttggagaccagccactcttcacccaaaatgatttcctttgaaattcctgacttgttccctttctgtcctgtgacctattgttctattaggccattctattctattacagcatcatttgaatcagtaggagtgggtctgggaggatggtaataccatctctttaatacctcaatgtggacggaattgaaatggccaagtccttacccagaagagctgtcctgaagaaggagcattgagtttgaagggaggagccaggtgtaatttaggagtggggaagacattggacaagctttgaggagatagttaagatgacttccatgaaaacagagagctgaagcctgttagtaacagactggaaggaagaaagatactcctttctttgctgatcttgcctaaagccagcaggtctgcactggcaaaaagagaggaaactgtctttctctcccctctggcagtttctcttctactaagatccagaatccaagctaatggcattagtgctataatttggtttcactactaaataatctttagttattgatccatgttagaattttgtactattggaaaatgtattctgagttcctaaaatcaatttatattattataatgtatgtaccgtactatcattatgtacatagtattagcatatatagcatttcattcccttgaaaccacttggtcttcatacccatcacttaaaaatactgcttcatattattccacccagtgggtttaccaaaatttatttaacctaaatatttcacaatagggaaatggcaatttcaatttctgttcttaaaattgtttccaatttttttattgtaaataatactgcagtaaatgatttttgcaagtggcatttcaatattttacattatttattgaggatggattgccagatatggagaggtagagttagaggatgtaaaatgcttaggcttttcacgtacaaagctagtaagattttctaaacacagtgccaaagtacatgcagtatacactgagaatgccttgttctctgaacactaccagcaatgtttttcttttttttatttttatgaagataataagctaaaatggtaacctatttgcctttacttcctccaaaatccctagaaaaggatttcaaaatttttttgaaggtaagagtcaatctaaacaaagaggacaggagaggacagcaacatttagaaagacggcaagcaaatggaggaataacacacttagtagacaaagggaggccaacccctaagctggttgagggagaagctcaagagcaggcaattataaaagggcagttccttttataaggaaccgactcctgcaattactgccttaactcattcatgaaggtggaaccctctgggtcaggctctggtgagggccctcttctgggtggcagaagctcaagggcatggctcctcttctctttgcccttctgccatgggatgatacaacaagagggctctcacaagacgacatcccctcgatcttgaactttccagtctccagaaccacagccaagacatttctgttcattgtaaattatctgcggtattctattatagcagcacaaaatggactgagacaggctgctatagcggactgccatagcagtctctgttgcactagaaggctcagaaatgggtagcccctggcacctcagaaagatagacttaaaaacggaaggatcagctaaaaatttctatatgaagacaatcttctcctcactcttgcagctgggtaactgccccagagccaaataaggcagaagacccaagatttagtgtctggaggggcttcttttatctcttgaagatttggaagattgtgttttccaaggacggctgccacaaaagctctcctgacacctgtgcttccagagccaagtgactgctccatcaagacgtgatatctagttttcctctccaagaatctggacagccttgggacttgcttaagccaacagaatgtggcagaaattatgctgcctgacttccaaagctaggttatagagccaaggtgacacgtgccttggggactgggccatgcacattggagtactgattgcccaggaaagcagtcaactgccctgaggccaccatgctcaaggaactgcactaggttacgtggatcggacacatgaaaaagctttgagatgacctaaggaggtagagagaggccaaatttctgattcacagaaaccattagagataatgaaataattgttgttgttttaaaccagcaagtttggggagcaatctgttaggtagcaataaggactggaacagagaagatgaataatagttttttggttttccaaaagaacttactctccaagtattatctttgtttttgctaaatcctttgtattagtctaggctcttagagcgacagaatcaagaggagatatgtacctatatctgtatctctatatatgaaaggagatttatttggggaattggcacatgcaattatggcagaagtcccacaatcggccgtctgcaacctggagaaccagggaagccagcagcatggctcagtccaagtcttaaggccacagaactagggaagccgatggtgtagctctcagtgggaggctggagccctcagacaccgggcggccactggtacaagttctgtagtacaaatactggagaacccagagttctgatgccaagggcaggagatgtcccagccctaggggaaagacagagagagagagagagagagagagagagcaaaaaaagaaaaatagaagaaaaaacatgcattcaaatcattttgtaactcctaattattaggacgataataaaagaagattccagattccagacctagagagcaaccagtacagactgaacaaggaagatgaagagctccatggggactatctttgtctttagtctctttgggctgtgctaaggattgaatgtgtcccccaaaaagcatgcactagaaatgtaatcttcaatgcagaagtgttgggaggtgaggcctaatgggagatgtttaggtcgtgaggactccaccctcatgaatggattaatgctgtaattgcaggagtcaattccttataaaagaacaagtctggtccccttttgtgcactcttgctctctctctctctctctccctctcctctttcctctgtcttctccctctctctgtgtcctcttctctttgtccttctgccatgggatgttcaacaagaaggctctcacaagatgccatcctcttgatcttgagcttcccagctagcttccagaaccatagtcatatatttctgttcattatacattatctgcagtattctgtgatagcagcgccaaatagactgggacaggttgctatagcatactgccatagactgggtggcttccaaaacaaacattgatttctcacatttctagaggctggcagtctgagatcagtgttccagcatggtcaggtgctggtgagggccctcttctggattgcaggctgctgacttactgttgtttcttcatatggcagaaggagagttcagagagctctctgggtctcttttataaggggactaaacccattcacaggggctccaccctcatgtcttaatcactttccaaggcctcacctcctcctaccatcaagttaggggttaggatttcaacatgtgagttttgatgggagacaaaaacatctggtccataacagtcaagaaaaatataaaacagtttacttctgtttccttccagtggtgagataagggatgagttagtgatgagtgtgcagaaaacaaggcaaatgaagaaacaaaagattgcactggaatgtaaatgcaagtgttttacaacatatatgatcaagaacaatgcaagcttgttacttagaaatatgaagttgatgccaaaaataagatggcttctgaggagtgggaagtggggaggtggagtggagacttccgttaatgtgtttcagggcttacagaagcacttgagtcctttcttaaaaatgtgtaaatttatggcgtacaagggtaattttgttgcatgcatggattacatagtggtgaagtcagagcttctaaggtctccatcactcaaacaaaatacattaaataaactctcgtcatccacccctacacccttctgagtctccacactctatgtccatgtggacccattgtttagctcgcacttataaatgagaatatgcagtatttgtctgtctcggtctgacttgtttaacttaaagtccttagactatgtatgtcacaacattcataaaaactgatcaacttaaataccacattaaaatgattacagaaaaacgcaagcaaaaatataataaagtaattttttcccctccctcaaagccaactgataacgaaaagaaagaaatggatgaccaaaaaaaaaaacaaaaaacaaaaaaactctccatgcagtgagccgagatcacgccattgcactccagcctgggctacaagagcaaaactccgtctcaaaaaataaaaaacctccaataaaatatggcaatgctcattgccacaaaccacaaattaggaaggatacgtgacacatgccaactactttgaaatttgcatcagaatgagagaggaggcagttaattcatgttttcttaacttcactcaaagttcagcaattcctttagctctatttcagtttcttcatcctattgctttcttatgaaatatgactttatttttttcctataaaagtagcagaaatgattgaaagttctttgcattttttggcggtgtttgaatttttaataagggccacatgtgtctttctaaaaattaacctattctctttttaaaaattaacaaataaaaacttgttctctttttaaaaattaacttatttgttctctttttaaaaaatgaagatttttttcctcaaaatgaatatacttttgaggtaagaggattttcacctagtattctaaaatcacaaaaacaagtttattatttttattttattgcaaatatttttcctacatggttattttcagatcaaataataggattttggaaataccagcctgaccatactgcacagattgagaggttaggtactaaattataggcttttagagggaggtaaagatattagagtccatctccactccactccccacagataagggccaaggccaacctagccattaggtggggtggacacaacccacgttttgaggggcccacacatatatgttaaaatttctttagaaatcagaagaatacaaatgaacttcggggtcaaagaaaatattttaatatttaacattaatacattttctcttgaggccaacattgtcatgaaatacacattttcataatttttttttgtggaagaaagggaccacaagggcaagtgtgcctggggcccatgaaagtcataatgtggccctgatgaggattctgggacctaaaaagattcctgtaattggtggtggcagagtctggaccaaagctcagggcctctaactcctcctctatggtgctttctgccatgctgttctctggcttgggtattccacacactccatggtccagcccacactccttatctgaccttacctctggccatcagtcatagttcatcttctgctccagttaggtaggcccagcctcatttcctgtaattcatcacaaacactctccatcccagctccatggagcctcccattgttcctagtccactgctgttcattcccagcactggctctcactcctcccactctccccatgtggagaatccttcccgtttccttctgcttgttcaagaggatcctcatctctggagactttgtcttaacactgcctttttttttttttaactgaaacagggtcttgctctgtcgcccaggctgcagtgcagtggcgcaatcagggccaactgcagccttgacttcctgggctcagatgatcctcctgcctcagcctctcaagcagctgggattacaggtgcatgccaccatgcctggctagtgtgtgtgtgtgtgtgtgtgtgtgtgtacatatttttttttgtagagacggggtttcaccatatggcccaggctggtctcaaagttctgggttcaagcaatccacctgctttggtccccaaagtgttgagattacaggcatgacccaacactcctggcctctttcaagtacctttaaagactcctccagccttgagtgatctaccctatgtataaaagcatttgccatttagtaacaaattatcttttcttattcatatttgtcttatatgtcttagttttctttccccaattatcttgtcaggtccttaagctcagaagcgatattagtcaaggttccccagagaaaaagaaccagtaggataagtataatatagataagagggaatttattattggaagtgacttatgcaattatggaggccaagacagtctatgatatgccatctgtgagctggaggcccaggaaagcccatggtgtaattcagtctgagtctgaaggcctgggaacagggagccagtgtgtaacctccagtccaagacgagaggcctaagaactgaaggaagtggggtgggcggagtcccagggcatgagaagaaggatgtcccagctcaagaaaaaaaagagacaacttacccttccttcacctttttgttccatctggcccctcaatggattggatggtgcccacccttattggtgagggcagatctactatactcagcctactggattgaatactaatttatggcaacaccctcacagacacaccccaaaattatgttttaccagttatctgggcacccttagcccagtcaagatgacacatgatattaaccatcacagaagccatgtctcatatactcactgagcatatatatgatcagcactcagtcaacacccaaatgattgtcagaaatctctcacaactccccctacaataatagggtcaagtgctacctcttctgggtgtcagaaataggcttggctttcctttctctttcttgtatttgtaccctctgtgatgaaagtcacgctgtctgattgcacattccttctgggcaagggctgatgtcttctcattatgtattgtcagtctccagcacagtctgtgctacaaagtaggtgtttggtaagtatttgatgaatgagcattttctagaaccaacttttaaattgaatttcttggtcctggagatgtttatttttcatgtgagttttccatctctgaaaaaaataggaaaagaaaagacaaggaaatgagaaagcaacttgaaaacaggaaaatattggtgaaagttattttcacagaagtcttagttgacctttctctgtagcattaaattccttccctgtagtattaaattcacaacctaagctatagctagctttccaaactagacaagcatcccacttaagcacaattgatctcatttcagtttgtgtctttgggcaatgaaataccgcaaagactttttctacctatgctttgatgctttttaaaaagtattttctaaatatttttaaaatgtttgaaatacacaatgataggataactccaaagctgtcatatttgtcaaataattcaagtcagaatttaatatatcctataactgagactcttttataaaattgagacaggcacctgaagaccatttttatttctgtattttcttggtgtcccaagcaaccccctttagagaaatcactaatatttcctgagcaattgaaccacaataaagaccgtggaaagaaaaaaaatgggtctgctcagacattcagagcacgcatccttacaaatgcattctactgacctgcaaaatgttagtgggaatttataaatgcctacaaaaagaatatccaagtcaacatttgacctgtcaaatctaatcagtttggttttgatcattgtaccgggttgctattcgcaaacactaattgaaagcaaaaacacaaacagcatttttaaagagtttctaggagaatatcccatttgcacacacgtcagattaattttccccagagttgagcaatttcaggatcaattgattactgatcccaaggaacaatcaaaaaagaaattccctgaaaaatttttttgactgtcaagactcagcatgggaaactatgccatgaaaatgcagtttgaatagcttgtcttttaatcccaagtgaaataaatcaatcatctattagacttttctagttccttgtgtagtcagggatagaagagttcgctgcagcaggattcggaggaactggggggatctgggtccaggaactcgtctgatcactagaatggggcagggagtgagcagaggagtttgcagcacacagtagaggaagctggtaggcacagaatagtaactggcaggcttacagctgggaccagaggggtccagcaatgataacagctcccggcactttctaagtgtattaattaactcatttattcacacaagaatccaataagggagatagttttaatagacccattttactaacatgaaaactgaggcattgataaattaagtagcttgctcaaagtgacccatctctttggcagagcaaggatttgaacatagacaattttgctctaacacctgtgcccttaaccactgacttgtaactgttccagggagaagatgagcctcttttgggcagcagggcagtggacagccactgaaaatgtgagagctggcaatattcaaagaggcacattgagatccttccaggaaagtctaactgcttgcaccagggtccaggctcaagggagggattcagggagcagcccctagaagtaagtgctttcacttgctaggcagtgcttccctgactcttaggctgcaaatttctaaaaggaaaaaaaacaatgttaaacacgagtgccagtttatatacctttatatattcagttatacattttgtaaatatattacagaattaatgtacatcataaaatacacacaaagggaaaaaaatcattcctttacatcaacaacctactataaatttacttcaaatagcattcatcagtactagcactagaaatgtgtgtccctgacgaaaaatatgtttttacataatttagatcttttattttgaaatttatcagaaatttcttgattagaacccagttttcctagaattattccctacttgttagattatttatccacatatagatgattccgtgaaaaaatgcaaagcaagacccttgatatattgtgtaatcctgaaactatatattaaaaacaaaatagtcttttagaaagcctgcagcagtaccccaaaataaaggtcacccaagaagaaaaattctccctagaataatgcctttaaatcccggaaacgaaagctcaagtgtttacccgttctttttaacattttcagagcaatacaacagagtcaatgtatgaaataaggcattggagttcagtgtaagctaccaccaatgacagaacatgtccattcagggcaaagatttatttttctgattataccaatgacccacacatacacaaagaaaaattaaattgaattaaaagaaagcatttcagcaatcttgacaggcttgagccctctgacagctcctagaattctatcagccgatcatcatcgtgttgctaaagccagctgcctcttgaaaccaaatttaatggaaagaggaggagctcaacaaagcagcttaaacatctcaccttcaaagctcattgaaaactaggcttcctatcagtcatgtgtcaaaggttcccctcatcctacaccatacagattagttcttcaagttccatttgtgtggtcatcctttgagtttccttgaagctctaaaaaggctaaaaggttatttccatctggagccactggagccttaatccatgtatcttttccctgcgcgaatctcaacatggcggaactggaaagtgagactcccaacttccatgtgaagggaacgatgtcaggcaggctgagaagcctgagggtggctggttccaaagggactgacccaagcctgtagcgagcaaggaggctgcctgctacccagagccaccaccccccatggcagcagatcacagcccctgttctttctcttttgaagcttcaggttagggatgggcaattcatagcaatttgtctttgaggtgataggtttggcaaaggggcatgatccaagaagtaagaaatgtgtgagaagtttcataaaggttgatggcgattgtgaccatgtgacctgtgcaatctttaactcatcgagtatctaatgtagattcttaactgccttgagtgcttttaagggactccttctgtgggggcttcatggggatttttcctaatggttaagctatgtaaatgtcttccacagctcctgtaaaatctcccatgctgaaataactacatccctgctctacagctatgaggattgtgaccgtatgtgtcccagcaagtggtagccaccatcataagctttggaggacactgtgttcttctagatactccctgggccatcttttcagatgtgccctttcagaagtggtcgccctttcagatatgtccttgtcttagcagttggttaaagcttcataggatatttgtattcaaggtgctagttcaaaaacatgaccttgaattcatagctgcgaagctcaactgagagaaaacatatttaggaggatggaatccacgcattgccgtagaaaactccttctcaccctggtggatacaacttttgaaaaatattgatacctgggccccatctagaaattagtctcatgtgggtgctcagagaacatagggaggtcattggggatggagtagaatgagcaaagaagagaagaaaatagggtgagagaaacaatggggtgtggaatggggagaagaggtgcagattagggagggcatggcaggccatggtaagggcttggcttttgcccagagggaggtggagttcatagagggttttgagcaaaggagtaacatgatatgacatatattataaaatgatcactctggctaaattaattccttttgccattgcatccttaaaataaacctaaaaatgcagaaaaactgaaaacaggaaatgattttccaagctgctactcaaatgtctaataacaagaagtgactagaatcctaaatcccagaatggtccacgtattatctccccagattcctgatagagatatgtagaaggcacatttcaagcaggcttatattgttttattctaagagggctgaactgggaatgtgaggtttcaagtccttctttgcttaggtgtatccagaggtaatacccagaaactcaaatttagtggtttgagatagactgtagacatcctgttgttaaaatgattccaatgcccatgtcgaaaacacgtctccaaaggctggaaaaatcaactgacattgacaaatgcttttagttttcctttcttggactctatatagctgtactgtctatacagtaaccacaagctacatgtggaggttgggcacttgaaacggggctagttcaaattgagattgtgctataagcataaaacactcagtagattttaaagacttagcatgaaacaataggtttatgtgttagtcaaggttctccaaagaaattgaaccagtaggatagagagagatacataagagggggtttcttaatggaaattggctcatgttattatagaggccaagaagtcccatcatatcccatctgcaagctggagaaccaggaaagccactggtataattcagtctgagcccaaaggcttcagaaccagggggacaactggtgtgagtcctggagtccaaaggctggagagctagaagcaccaacatctgagggcagaagaagacggatgtcccagcacaagagagggtgaattccccttcttctgcctttttattctttccaggtgctcaatggattgggtgatgcccactgacaattatgatcctctctattcagtcgactgactgagatgctaatctcctccaggaatgccctcatagacacactcagaaatcatgttttatcagccatgtgggcatctctcaggccagccacattgacacacgaaattaaccatcacaatgtaaaatgtctcaataatttttacatagattacatgttgataaaatattagatatactaaattaaatacaacatattattaaaattcatttcacttttttactttttaaatgtggctacaaaagaattaaaattacaaatgtgggtcccattacacttcttttctttctttctctctctttttttttttttaaagacctctgtctcccaggctagagtgcagtggcacaatcatggctcactggagcttcgaactcctgggctcaagcaatcctcccttcctagcctcctgagtagcagggattacaggcatgcaccaccaggcctggctttcacattatatttctactggacaggactgatgtagagcttttcaaagactcctcttacataggaatcatagccctctatgataaccttcaaaatacacctacgatgctaccattctccgcagtaatttttttaaagaaaaatgctaaattgcttttttagatctttcttgtaggcaagatataaatagaaggctttgaaaggcaatacaacatagtagttaatagtaagaacttggtagatgtgtgactgcaggcaggttgtttaccttctctgaatctccattccctcgcctgtagaatttgaataatatgtaccccatggtgttgtgagactaaataacatagtccttaatgctccataaatggtagagcctttgtaattggtgctgaaatttaaagacaatgtggagttatcttggattcaggtgatgagattcaacataagaagcaatgcctcaagtccttgcaccaacagaggtgcagaaattcatcatctccctaatgaatcttgagttttctttatacttctgtcatttgattagaaacaaactctcagcatgtcagatttatattcaaatctcagaataaaaataattacagaagcaaaatgtcatttggaaagggtgtgtttggtggtcagaattgtggttgccacgtgccttcgctaaatatcatgactaaaagggaaagacatgcagatctttgctaggaaggcaagagaaagaagaggtgaataaaaggcttgaagctcttgctactctaatcaaattgttttatttgtgagagttcgctttagcttgctctttatgtttgaacctaagtcttttcacctgtgacctcatcaccatttttctaatattgctcagctcattagccttgaaatttataatttagtttttacaccattttatcctatttcttcccattgccaagcacaaacatttactttgtaaaaaaacgtgactgaatttattaaaccagtttgtcttcaaaagtttcccttttttatagacatgggaagactcaaatagttggtttccctaattctcaggagacaaaccagtgaagctgaagccagttttgtatgcaactaaactttgtgccccgtcctttgggtctccaattagaataaaatcagggatgggcaggcagcgtgcattttaaatcaccatccatggtcactattatttccaaactcaaaggcaccattagaacagggaaacatttgcaggcatttcattacaccttgaactattaaaaaaaataagacattagaaagaagtgattactttaaaactttcacacactatggaacaaaagaaatggcaatacacagggagatattatagtaaacaaattgacgcacacggttgttgttagtgaaggacagtattacaagcagatgaggcaaatgaatgagttgggaagagagtcaatctcacttcctgaagcaggggcccttgagaagcctgtgccttttaggctgtttctttgtaggattggcctgggtgctgaaaatagcatagagccttttgcagaatcctttatttcaaggagttgcggtatttcatatgtggcacggcccctcccttcaatggcctctctcctgccactggaaggtgtttttacagttccccttgtgacaaaggacaggtcagagagcaaacctgtgagcaaatcaggcttggcacgcacatcactaagcaacagatgctttctggaaaaccatttgggagtgtttcagatagtagtatgtgtgtgtatatacaaacatatacataatttctggggaaaaaatacatacatacatgtgtacatccatactttctgaaaatcacacacacgcattttccagaaactcatttgaggttgattttatgtgtacggagacagagaaagccatccatccatatagaaagccttttgcaagtatttttaatttatttcatagaagcctgaatttatttcacacaacaatgaataaatccattcttttgccacagacgtggtgcaaaaagaggggtgtgcttgaagcatctacaaaggggaaaaagctgctgatacagggaaaaaatattaaagtaaaattttagttgtcagctttgtaattgaagctgtctcctcacttgaaaatattgtttccactgaagtagaagacaaagggggatctggcaaatgcccccacgatgttcatttccccagataaattacacacatcgtgtgtgcatgaagatgaccagaggctctcactgtgctggggatacagtccaatcattcattcaaggctctgtgtagtcatacaacaaacgcgtggcctaaatccattctttttcttctttttcctttctcttctcattttttcttttttcctccttcttctgccaaaagacagataaagtataataactttgatgacaacctcattttcaggatctctcgataaatcataatccttcagttgtattttccaaaacctgcagttagccaattacttcttggtttccttgaggtgaatctttgctttttaattatattttatcttcttcaaagaaaccactattgaaaaattatagctaatggtagaaatacatcactaagatgtcttggattttcttttggggaggagaggtgggggaataaaatgaaaaaaatatgtatatggccaaattggtctgtgataccattaattcatgttcattaattcaaacagtgtacattgcatacctactatgtgctaggagttgggttgtactccagaaataaaaagtcaaataaaacgtgtttccctcaaggaaactatgttctccagcatctgcacatgtaaactaccaattccagtttagtatgacaaactctttggaagtattatattttgaatgtatttcatcgagaaatgaatgtgggccaggcaaggtggctcacatctgtaatcccagcacttagggaggctgaggtgggtggatcacctgaggtcaggagttccagaccagcctggccaacaaggtgaaattctgtctctactaaaaatacaaaaattagctggaggtgttggcctgagcctgtaatcccagcttctcaggaggctgaagcacaagaatcgcttgaacccggtaggcagaggttgcagtgagccaaggtcgtgtactccagcctgggtggcccagcgagagtacatctcaaaaaaaagaaaaagaaagaaaagaaaaggaaaaaagaatttctaagtctggttttcatagaaacaagtgcaaaacaagccagaggggtcattgccaaactagaaagaagcccagggccagaatatgcagggttagtggagaagcccagtgctcctgggcctgaccacctcttggactcggtataccatcataaacagcattcagtaaacatcttttttgaagaggcatagtaaagaactacctgctaagagtccagaaaccctgtgaggcctcagataactttagtaggaaataaccaagctcttgagttgcttgaagtagaatcccattagcttctaatgcttcctgtatttgcgccccattcaaggaagcaactctagagaatttctttgaatcctgttacttccatttgatgagtgagactcagctgtgatagtctatctgctttaagactgccgatacgatgtggcatgttctctaaagaaggcagaaggcttgaggacggtttgtgttgattgaagaacatttcagtgatgagttggaatatttagacaaatttcaaggcttaattaatatatgaaataaagtagttgcagagataacgaggaaaaccaaagttataatctatagttcatttaccttccttggtcagggcaaatattacaaaagatatgtactgcttttacaataatcagcaaatgggaatgactttgaatttcagaacacatatgggaatgtcatcaacttcgactttgaaatgtggctttttaaaattaaaatataaatcattctattgttaacaaaagtttatcaaaagtaatagggcttttgtagatttttggtttttcttttctattaagatctttactggtagagaaaaataaaattttattaattcaaagattccattgtgtttttatgtttgtgagtaataatcagtggttcctggtatctcatttcgtttttaattcccaaagcaggagctaataagcaaatcgctttgtgggtttctgtgaaaacagctagagtttgcacaatcgtcgcctagacagagggaggagtgtgggctctgaagttcagcagatttgcatttgactcttgactctgtgattagctgggtgtccttgagtaaactactcctgtaagcctcagttacctcatctgtaaaatagggatgatgacatctgctcaaagcgttgctgttgagtaattaggttaaatgagataaaaagtgcccattggcacctattggaactcagtaggagctcatgtcttcatggtgtgtaaatatgtacctggctcccatccacaagagtcctcgctgaatcaacaaactcacaagtgcctcttttcactagactgagactaaaaccgcgaattaaaatggtgtttgtcctcaagaaccactagggtcaagaattctacatggctcaggcagatcagctgagcacgtgagaaaataaggaatatgcagtctaagtacagagctcagatgaagcaacttgctgcctatcaacagaaagggtggaaacaccctggtgtgtgcaacaggcacaaatcatgtaattcagtaagtctacaaatatgtagttaaagaaacaatataatttctaaaagcagtctcctcgcagcaaactgtgaagttagcagcacagaagcaaactgaggcagagtcactggattggagacaagctgatttgtgaaagctgcttgagtaattgaccaacctctgcacaactatgttgcagtttactaaaccagtataaaggagaaaaaaagcagtagaaattaagagcattcgttaagctgtaagtcctttcattcttttggatatattattctaaatgcatcttataacattttcattaataaactgctgttttaattaatgatgaggtctcagtcaactgaatgacatttctttcaagaagcccacttcatacgcacacaaaagaaccctgaaatttttcactaaaggaaaggccaatgtgatccaactagttgaagaatatactattgcaattaaaaaatcatttaattccattcggctcaactcaatgaacatttattgaatatctgctggaggccaggggctagctgggattagacacagttcttcctttcagaaactcacagtctagagagaagcctggtgcatgaataaggcattcacctttaacctccttatccctgttctgttccttcccttctcttcctggtaaggcacgcttatttgcaaaagactttctacatgaaaaaaatatatatatgcatataggcatatacacacacatgtataaatattcatatataccctcaaagtagtttcccaaaattacttgtgtgtatacaaatattcatgttcatatatatatttttttatagaaatgggactatggtgttgtattaatgttggtttcctgactccaacttgctctcacatggttcaggaattacatataatatatattataatatatttaatatactagatatgtaacattaaaaattattttaattatatataatataatgttaaatataaatatatttaaatttttaatatttatatttaaattttgactaccatttgtattatatctaaatataacatatttaatatgagagagaaaacaaatatagtgaaatgttaaaagttagggaatccagatatggatgatataggagttattcatactatttttacaacttttcaaaattatttcaaggtatattggtcttgtaaaaaattttaaaataagggattcaagaccttcctggcctcaatcctgcctttcttcagcagcacctgcagccgtacatcaccccacatttaataccaagttatgtccaacatcctcccgctgtcgttcctgacgctgactgcacattagactaatctgagaaaatgctgaaatatgccaataggcaggcctctccccagacaatcagatcaggactcctgggagtttgctccagccatggttttttccaaaaacatagcctaggttgggaagcctggaggcctgtttcccaaacaccatgctgctgcattcctcatgccttggtgcctgctgtttccagtacttggagggtccttgtccacctcttcagtactgtagattcctattattttgtcaggatccaactcagatgtcgccttccttagtgaaaccatccaggcatcccacgccccacccacaggtagatcccatccttcccgcctcctgctatttatttctacacactctccttctacaggtttcccacactgttgtaatgctgtgtttgctctgtctcccaacccaccgcaaactccgtttgggaaaagtatatatcatgtttgcttttgtcatcagcatgagcctcacatatagtaggagtctaagaaatgtttactaaattaaatgcaaacaaggttatacttgttggaataaagttataacaaggagctatgggacacttgaggatgtgcactcttacagtgcaggcggcacttgcggaaggagatggagctcacgcagaatcgaagagtgaataaatagctaagtagtcgggcaggagagggaaatgggaacagcccgcctcttaggctggctggagccacgtggagtacgcgaaggagaatggccgctgaggccaagaagggagccagtccagacgatgaaggggaccaagagcgttagtcactctggaagcagagtgagcacctcgcactgcgctggcacacagatgcctctcagtcaagcattttagagaaataatgagtgaattcttttttgctctttttctttacatttggcaggggagtcatgggaccggattgaaactaactttcttcccagaagaatgtatttgcacatactttcccgaaaatgtcagaagatttacaggttttctgaaatgtattcagtgacacttcccccaaaatgatatgccacattctaagaagagggatatattttaggtttaagaaggacatggttagactaggatgtaaggcgggtcactgaaagtctgtgaaggacagattataggaggtaagatgcccattggaggacaccctttaagaagtcatcacagcgtggtggctcacgcttgtaatcccagcactttgggaggccgaggcgggcggatcacgaggtcaggagatcgagaccacggtgaaaccccgtctctactaaaaatacaaaaaaaaattagccgggtgtggtggcgggggcctgtagtcccagctactcagagaggctgaggcaggagaatggcgtgaacccgggaggcggagcttgcagtgagccaagattacgccactgcgctccagcctgggcgacagagcgagactccgtgtcaaaaaaaaaaaaaaaagaggtcatcacaggtgccaaagtgaaacccaagtgcctgaaccagaggcatgacagagctgtgcccaagagagaacagatgcaaaaggttacgaggcaatgcaaacagagagcttagggtgtctctaggctttctgcctttgagtgaccatgcagatgcagtgtcattggtcaaactagaaaattcggggagaggatcagatttgtgggaaaggatgaattccattgtgtgaagcttgagtttgggtttcccatgaaagaacaaggcggagtttccctacagaaagttgcaggttgggagtgatggagatgaggctctcctgatgagtgagtatagagtgtgatggaagaggagcactggagggaaaacctcagtgccccaacattttcaggatacacggaggaaaaagagccaatgccttacagagaagctgaaagaggggaaaggaaaaccaaagagagtttccaaaggctccaagagttgagtaaatcaaataagggcagaagtggtctgttcactttggtaactacgaagttcatgaacacctcagtgacagcaacttcacttcagtgaatggagttcaggccaaaatcaatgattaggaagtgaaaatgaggagatgagaaggtttctagaatttccccagttagattgggaaaatctaactggacctctgaacagcattctaacctattggtcagctcctctttcttgaaaaaccctttttccttggcctcattcagacctcgtgttcaaggggtccccggggtgccctaattacttcctctctgttcttcctttgcaagctcatttccctgtcccagtttgaaaagggtgacttctcagggccctcctgtcttctctcttcacacacttctcccagggaattctatccatgcttgcattgtaaataccatcataaaaatgattttaaaatgaatatttcagcccagacttttttggctctttgacttctatgcttccctgacacaaaggcacctcaaacttgacctgttcaaagctgaactttgttgttgttgaaacagcatctcactctgttgccccagctggagtgcaatggtgccatgatgggtccttgcagccccgacctcctgcactcaaatgatcctcccgcctcagtagctgggactacaggcttgtgccaccacaccggctatttttttcttttcttccttttttttttttttttttagcgacagggtccccctatgttgtccaggccagtcttaaactccagggctcaagcgaccctcctgccttggccttccaaagtgctgggattaccgtgtgagccacagcacccagccaaagctgaactcttgatacctgccatatccccaaccccaccaagattgcctgcctctgtgttcccataatcagaaattgtcaccaccatctatccaaaaatccgagtctgtcttaacactctttccttcacctttttaattcctaaacatcatcagattctgtccactctactactccaaaccatcattatatttattctgtcccattgcatagcctattcaatggtctacctatattccctcttttctctttccaatgcattcaccaaaatgcagccagaatgagctttcaaaactgaaatcagattatgtcacctttgcttaaaacctttcaggagttacccgttgctttctgtgtaaaaaccaaaatcctcagaataccacgacctttctatctagcctcacttcctactatggtctcccctgagggtttgtcatcttggcctccactacgttcatcctcgacattctcttcttcctcagagcctttgcacatgctcttttctcttcctagaatactttccctacccccgttaccagcaaaatctcactggccttcaattattaacttaaatgtaatttacgacctgctaaatctctgtcagctcatagttcacagatggcagttattacatatttgaaagaatggattaaaaagactgagtgctagccagaggaaaatagaggttcagggtaggggggcctttaagatgagaatgatttaaagcccacagcaatgaaatgatttgcctggccaaggtcaaaaagcgagttggtggcaaagccagggctgcaatccacgacttttgattcttggcctccccatgtcccacactaatcctttattatatgtcttagatgaagttagctgtagtgaagccctcatctcatttgctgtccccaaaacattctaacctgttgaccaccatgcacaacaggaatacgtattaacacagtttcaggagcatgacccaggaaattctataatagatgcaaactatcttcctgtttaagaccctagtagagttgttcagtggtgctgctcttaaattccaatccaagaaggccacccggctcccacacagtcaagccatagctgattgatgtgtttacagtaatatacttcacacttgtgtcttgtgggccacacgtgccactcaggataaacttagagatttttctttggcattttttctccattgtacagattcagacacttaaagcttattacatagaaactgacctagaagtgaccgggcctttggagagaatggcaggaaattggttacaatagatatggacccacctggggaaacagaactagcagaggtgaacgttaacccatcccaggtccaatgttgttagtccaaaaagattacagtaagttgaagaaaacatcaaacaaacagaataaaaaattcagcaaggaaattcagagtggtacacttggggagaaaaagcagattttgccaatgtaagaccaggagaaaaactggttgtgtttcagcattgcagtatcttgggagaataacaaaacaagtttaagcagagttgtgccatgcagattgcctggaaggaaccaggcctgcctgatgcagaatcatgatgcatgcagaggatgatgtccaaggtccccgggagcagaactccataaaattcacttaactcttttactaggtgactaattaaaaagcagttaatgagagtgatcattctgggcaatggaattcagccatgaaagtggttaatgacctgaggctgcagctcagttctatgcctcctctagcatggttctggctcccaggagagcctcctagactttagcagaagctgcacagagcttcaagaatccaggatatctgggaagaggtaggagagcgcattgggcgacagaaaggagtaagcaaatattaaagggtttatttacagcagaaggtaaaaagaaagaagctcaccacaatgggagctcaataaatgtggtttgcttgagcgactaccttgctgactgaaggagtggatagagcacgtgcatgaggcagcttgcacagtctgggagacctcgcttctcagctccttatttaatgacatcatgttggtagcttgaagtcggacaaggtggcagtattgacatcatgggaaataggcaaaaactataaatcagaatttttccctccccctcaagccagttgcttaacatctaccaacttaccattgggtcacttcgttgaaatccctgtgggagcagagttccctggggttcttaccttaagaataaacctgaaggcgttttggttttgctttcctattttaattactaatatacagtggcactcttcagtaatcttttattacacaaccagagtggctcagcatttgtgaagtctcctggcaaactcaccatcatttaaaacattgtttctgtggggaagttttccaagttgcaagttactgagtctaaaataaatttttggaaaagagcccatttgcaagttgggagctttcaattctgagtcctgataggaaagttagaaaacaaaaagaatcatgccaattttaaaaatataggttgcaaaatataggttgcaaaatcctaagtgaaaaggcaaaaggaatagaattatttaacttggagaagagaaagatgaagagcaattgaataataggagtgagtgccagctgttgtttgcttttggtttctgttttttgtgggtttttttttttctcccactgtaagcctcggggatttggttaaacaaggagataaatatctttatgttattattctggaatgaataattggtggattttatgtcaaacatctgcaaacttcttttcctcaatcagggataatttacatataacctgtgatgaggaccaagaaatagttaagacaaggttatttgtctacttgaaggttaactgtcaactttgtgaccctgagtccacagatggcataatgtatttcaaaactttgagaaacatgatataattaagcaaatcctttttatatcatagaatatctaaatacagaatttattatttttctatcaaaaatgattataaaacttagactattagcattatctatagtagtattatattgtctatatctgttagtattgtctattactagtatctatattactagtacaaaaccttaaaccaagcattctaaatcaatactttttgataattttacgagggaaatgatgctattttgggcttgttaatttagagttattttcagttattcattcagaagagatgagagaattgctttcttttagaatatcttttagatattgcagtaccctgatttggcattttcttaaagagatgtgaaacaatgaaatggcagctgtaaatctgccacttggagccttagagggcttacatcactcccaggctttgctttaacagttggtttatgatgtggtttcagaataacacttttgaacatggtatatcccttcctgcaaaactgacataaatccataaagcttttaatgatgtctctaaaatacagccaaagtagtctctgaggcatatttttggattgtttatctgaaatctctagattgctgaatctcccttcatgatctgccttggaatggctgtctccagggcagctgataaacgcatcatgtctcacccaggcggggaccactcagcttcgtgccccatcaggtacactaccctgcctcagctttcaccccaagcatctcacacccttgtgcgcataagtatcacctggggacctgcgaaaaatgctgcttctccagaacccctgagctaaattctgggactaggcctggggaccagcattttaacaggctcccaggaaagtggtcacagaaatgatgtgagagtctcagctctacatgctctctgactccagttctggcttcgggatggagtaactggagagaggctgacaggtggaagctgaggttcttgccggtgacacgctgcacctgtcactcaggtgctggggtctctgctgcccagacccttccctccctaggccaggttctgtgctcctcagtcttgaatttcaagcgcctggtatgcgtgtcttctcttgcacatcatcctgcctgccccactgtgattcatttgaatgccccagcctccatctctagcctgcctcccaccctccctccaagtcccaggtccacctcttctcacccccgccagagcctgttctcaggtaatgaccccccacattctctagcagaacctctctctgtggcaaactgaactgctcagtgtgttttctccaggcggcccgccctgcctgcccttcctgactcctcctccctcccctgtcctctgttagacacatttacagaagcctgtcctaggagtgtccatctgccccatcagactctgaactactgagggcaggggtcacctgtgccttgctcacgggatccccaacacccagctgaaatgtggtgggagcctcgggggtctcaagtgaatgactgattcttaaaaagaagcacgtgaagtttgtccaggcggcatgatgcctcagacttcagaccctctcactgccaatacactgtgccttcagctagaaagctagtcttcatctccgccacctacctgtacttggctacccacctctggccctccaggtcccagcttagatgtcttttcccacagcaagtcttccaccacccctgtgttccagggggccctgtgtctacctgatcctgcacttacccctctgcattctaataatctgtttacctgaatcctcctccaggtccggagctccttcagagcaagagttgtcagcacccagcatcgtgcccagggtgcagtcagtgctcaatagatgtttgctgaaagctaactcagcacatttaggtagtgagatggggttctcatcacatagctgctaaataaaccgccataacattcactgtattgtactcacactgttgatgcgtctcctcccacaaccactgctagatggaaatcttctcatgggaagtgattgtattttgttcatcttcacacttcagtaagtcaggcagcaatgagcatggattaagtagctgttcaatcctatgttttccaagaaggatagttttggcatgtggagcaggagaattctttttttatttttatgtatttatttatttttgagatggagtctctctctgcggccaggctggaatgcagtggcggatctcggctcagtacaacctccgcctcccaggttcaagtgattctcctgcctcagcctcccgagtagctaggactacaggcacctaccaccacgcctggctaatttttgtatttttagtagagacggggtttcaccgtgttggccagaatggtctcagtctcctggcctcgtgatccgccagcctcgacctaccaaagtgctgggattacaggcgagagccaccgcgccccgcccaggagaattcttaattgcataagacagccccacacattgcaggacatgctgctgtccttgcccgtgcccactaaatttcattggtatcccaatcattttgacaactaccccacctacacacacagttacaaaagttttgggggtaagaggaccaggaggaaaattgcactgcacatagttgaaaagctatagttaagtcttttccttacaacttggtgagaagcaatggactccgtaacagtgccatggtggattatatgtgtcaacataattaacagaaagaggatctctgaaatataagatatttatctggaaataaagcattgcaatgggaatatgcatgccatagttaactacatgcatattcagggaggtgaagacaaaagtttttaaaggaaaaaaggaggaggattacataattgttttaaaataattatccttggctacaaagatcaataacaagggtgacaccagtccaagtttggacaggcaaattcagggcagttgttcttgtagaaccgtttttttgtgtaaggttgcaatggtgtttgggcaatgttgtgctttttgcagagtctctgtgatagttcttttgatcaggcatttattcatggccttccccagctccatttctcagggctttcttttttttttttttttaacattagtgacttcattttgattctgacaactttcacacatgtgtgtggtgatgtgaggtgggggccaggacatgtcaccctcaatatacaacggtaacctgtctttgtaataatagttcactaatctttcctgagcacttatatattccgggcactaagctgtgtattatatagtttacttaatcctcacaaccacctatgaggtcccattttttagggacgaaattgaggctgagaaagtttcaagacattgacccaagttaacacggctgctacagacaagggcaagatacacccccaggcgtcggacttcgctgctctgtgccgacctctttaacaagaacaaacatcaaaattcccagttggaagactcctattaaaaactgtcctctcccattaattataacgtagagcagttttgcacaatatattctgcatagtgttaatttagtgggatgtcaagtgttgtgagattaacggttgcatgggcgatggagtgtgggaaatgctttcagcaaggcccttgtagaaggccgtgaaacagaaaccgtgaagaccacaggatccctaaggtggcacagcccttcacagtgagtcggagtgatttagaacattgctgagcaaacagcagggagaccggcaacaggagcttgctggccatgaagtgcctaatatccagtaagcactgctcaggctctaggaaaaggctgatgcaggaagggtttctttcttctaatttctcaataataataaaaatagatactatttatggagtactaattactctccacttcatagatgaaataccaaggcctagaaaaatgtgttaagtaacttctcctaaggtcacacagctatttagtggcagagccaaatttgaacccagttctctctaacttcaagacatgtgattgtaaaccctatacacaaagtctctaaggacgtagggcttataaaggctttcctgtatgaatatccaagcaaattcagtctcaaagaggatgcccctatgggttccctgtaccagggatttatttttggcatatctcttcaacctgacaattcgttccttggtctgagtacatgaaatttttttcagggtatgtgaatttttttcttggtatgtgaaatttttttctggtataatgtaagtttcttaaattttactatttttttaattttatagatttctatatgatatggtttggctctgtccccaccctaatttcaaattgtagttcccataatcccctcatgttgtggaagggacctggttggaagtaatttaatcacaggaggaggtctttcttgtgctgttcttatgataatgaataagtctcacaagagctgatggttttataaatgggagttcccctgcacatgtgctctctcttgcctgccgccatgtaagacatgactttgctcctcctttgccttccaccattattgtgaggcctccccagccatatggagctgtgagtccactaaacttctttctctttataaatcacccagtctctggtatgtctttattagcagcgtgggaacagactaatacatcataccctgttacatgctttttttttttttgataagagtatttgtgttgatgcaatagcatctttctccatagaacttactcagatgcccttcctggagccagtgcctgcactccatgaactgctggagaggtcattgtagggtatcggcatcagacctctcctcatttttcaattctctctctcctttataacagatgttggtgcattttttgaagaagggatgtggctacgatataactttcaggcaccagcaacaaatgccagagactccagcagcagagtagacaacgctcccgaccagcagaactcccacccggacctggcacaggaggagatccgcttcagcttcagcaccaccaaggcgccctgcattctcctctacatcagctccttcaccacagacttcttggcagtcctcgtcaaacccactggtaaggacaaggatacccagcctctgccatttaacatttgggcagacagaatgttctagcaagagtctatagattgttcttggtttgttatttattccccataggcttttttaagcaagtcacataacttctttgaaccccatttctctccatgaatatcaggaaaacaacttgccagctgggtgtgttagagcaaggtgttagagtaataatgttggtgaggcatgttgcgttctttacaagaatgctgttgcatgaataagagatatgtttgcatgtgtaatgattattttttctccctactaaataaacacatttggctggacactgtggctcacgcctgtaatcccagcactttgggaggccaaggtgggcggatcacttgagctcaagaatttgagaccagcctggccaatatggcgaaaccccatctctacaaaaaatacaaaaattagctgggtgtgatggcacatgcctgtagtcccagctactcaggaggccaagatgggaggatcacttgagcccaagatgtcaaggcttatagtgagccatgatcgtgccactgcactccaggctgggcaacagagtgagaccctgtctcaaaagaaaaaaaagactaataagaaagactaataaaacataaatacattcactaaatgtgctaaacagagatgggctttgaatgagtaaaattaattttacataaattaattttatcctgatttatgatagtataccagtaggttgttacagaacatctgaactttcaataggagtagaaaatcagaaatgtcttcattcccaatcctctcagaactttaaattcacaaagtgtatccctgtcataaaggttgcttaaagcaggagtttattttaattttttttgaaacagggtcttgctttgttgcccaggcttgagtacagtagcaggatcacagctcacttcagccctaacctctcaggctcaagcgatcctcccacctcagcctcccaagtagccgggatcacaggcacataccaccactcccagctaatttttttaattatttgtagagttgggggtctcacgatgttgccaggcctggtcttgaactcctggactcaagcgatcctcctgccttggccaaagtgctgggatgacaggcatgagccaccatgcccggcccaggggtgtatttttacttgtaatatcctgggccatcttggtcgtcaaacacacattaagccagagaggatctgagtgcacctaaaattggcatcctgaggagaatatgcaaatgggcttgtgacccttcagcagtgacctctgagagacatctaagaagccctggagtgtacaaacttgctgaacttgagaagtccacttcctctctgaaaatgaactcatataccttagaattctaagatcactcttttttttttttttttttttttttggagatggagtctcgctccatcaccaggctggagtgcagtggcgcaatctcggctcactgcaacctccgcccctcgagttcaagcaattctcctgccttaacctcctgagtagctgtgattacaggcctgcaccaccacgcctggctaatttttgtatttttagtagagacagggtttcacatgttggccaagacaatctcaatctcttgacctcgtgatccacctgccttggcctcccaaagtgctgggattactggtgtgaaccactgcgtcagccctaagatcacttttttaatgaataaaaatattttaagagcatgcaggaacaaatctctctaactcacttcccattggagccgaaaatatggagactctctctcccactgcccattgtttcctgcccttcagtgattattccactgttatggcatcttaaagagcaagaattttggctgggcactgtggctcatgcctgtaatcccagcactatggaaggctgaggcaggaggattgcttgagaccagtagttcaagattagcctaggcgacatagcaagacaccatttctaccaaaaataatttaaaaattaactgggcatgaaggtgcacacttgtggtctcagctgctcaaaaggctgaggcaggatgattgcttgaggccagtagttcaagactagcctgggcaacatagcaagactccatctctaccaaaaataattttaaaattaactgggcatggtgaggcacacctgtggtcctagctactagaaggctgaggggggaggatcgctggagcccagaagttgctggagcccagaagtgcaaggctgcagtgagctatgatcacgccactgtactccagcctgtataacagagcaagaccctgtctctaaaataaaataatttaaaaaaaaagaaaaaaggagatcaagatttttcccatgggagctagaactgttattactaacttaattcagcttgagttttaaaaaaacagtaaattaaactccctctctaggaaatgcactgttgcttaaaaagatggaggaaaaagtatgttccctagtattttccccttctgaaattattcctaaagaaataagccaaaagtcaaagattcatcatgaagatgttcatcataatgtttcgttttgttttttgagacggagtctcgctctgtcgcccaggccggagtgcagtggcatgatctcggctcactgcaagctctgccttccaggttcacaccattctcctgcctcagcctcccgagtagctgggactacaggcgcctgccacaacgcccggctaattttttgtaattttagtagagatggggtttcaccgtgttagccaggatgatctcaatctcctgacctcgtgatccgcccgcctcggccttccaaagtgctgggattacaggcgtgagccatcgtgcctggccaacatcataatgttaactatgaaaataaaaattgaaaagaatctgaaagttcaacttttagtaaaatagtaaaagagggagttgccattttatggaatattatgtatctattaaaatatttatgaatcgtgattaatgatatggggaaattttatgtatgttaaaccaaaaaaacatgaacaagatccagccttgaatgtgaaatattagctccataaaaaatatagggatagaaaaaaaaaagcaataatgtgaacacaaaagtgtttggttggattgtggatgatttttttttctcctgagcagtacttttgtatgcatgtcaaatgctttaatcagaaagatgaaaacagtaagtaaaatcagaaagtgaggatgaaagagagagaagtatggagcccctggtcttcaggagttcatcagtttatttctcctggatcagggtcaataggtttttttgacccactgatgttcactacccacatggaccagcctcccactgggcagataagaaccttgggtttcttctcaggtccctccccaggaggagggctctcacccagagactgtcaagaagttggtgaacacattcccacacatacttttattgtctgctcctcgagtcactgccacactagatttggtcctcaactgtattcgctacctcacatgcccactgctacacacccaccgctgctgtgccttcatcacctgccactgctgtgccctcatgcctgtgtgaggactttcattgtcttcaagggcgttgatcaatggattctgtattaatggccaccatttaatgaagctcactttgtgcccaaagccatcctgaatggtgccatgcattaattcccatgagctgcacaactctatgaagtagatactattattatttcctttctactgatggcaacacatgagtgcatggaggttgagtgccttgcacactcagaggatgttgggccaggctggggtttctcagcctgggtgtccgattccagacccaaagctccccaccggctgtactctccagggcaggcatctctggaactctcagtgttcttggaaggcaaagctgggtgggttctgtctcactgttacaagactatcctcaaactgctggtgaaaattcagctttttcagacttcaaatacaacatgtttttattatttgaagtttaaagttagaaaaaaaaggaaatcattaggaaaaaacatcagtaaggtctacgccaaagtatcaggaaaaagctactagaaagtctccactaaacaccctggcatcactcacatttcacatatcgaaagctctgctcactgtcctccagaaccagctgcccccagcaccaccactgcccatcagacacttgtgttcccaaggtcagtgtcactcaccagtgctccgttcttccctgcttttgtgggtcacccaggcaaacaagtcctgtgaattgaactcatggtgtccttttcctccccaccactactctctgaggcaaatatcttttaattcccagtagtgtttacgtcatggtgtccatagaaaattattatatttgaatggtaccagggtaaatggatgaggtcatgttttggaggccacctgcccagtgactccagctgccatccccttcttcatgtctgccacggtgtgaggggagccttgctcctggtaccccatcacccatctgtaggacagccgtgggcttcagcttgttggctgggaaattctctcccaatccatctctctgcttccagattctccccctcaccctttttcaccacagccagcaccgcctgcctttatagggtgtcttattttctgttgcttgtaacagaatacgtgaaactgggtaatttataaagaaaaggaatttatttcttatagttatggaggctaagaagtctgaggccaaagggccaaacctggtgagggccttattactggtgggaactctctgcagttctgagacagtgcagggcatgacatggcgaggttaagctgccagctcaggcctctcttcctcttcttatagacagtcccactcccatgagaacctgttaatccattaacccattaatccatgaatctatgaatggatcattccatgaatcgatgaatggatcattccatgaatcgatgaatggatcattccatgaatctatgaatggatcattccattcatgaggacagagtcctcatgatccaatcacctcttaaagggctcacctctcaatatacccatattagggattaagtttcaacctgagttttggaggggatattcacaccatagcatagggatattgcttaaaagggatcttgtataatgtctttattaaacactcagtggtgccccactccagcaaaaccaggagagactcctcagtgccacaaacttttaagtttgagacccaccaagctcatgggtgagatggtggcctgtagagctggaccgtctgggtttgaggtcggctttgccttttgtcagttgtcttgggcaatcagttggcagctccatgcctctgtttgctcatccataaaatagtgtctccctcacaggagtgttgtgaaactcaaatgacaatatgcatgtgtcaacagttattatttcccaggtccacggattcaatctacattctaacgcatattcagcaacccctactcttcgttttgagaaactcattacccctcaagcactctgtggtcatatgtgcacctgactttatgcctgcaatactcccttacctagaaatgccccaacttcctctctagccagacacctgcctttcattctaggctgagatcaagtcccacctccttttgatgacttctccttgctttaaactcctattccacttactttcaatgtcatttgtttggcatttaatgtactgtattgttatctgtctctgtgataaatatgccctgtcttcccagagagatgaaaagctcccagcactacatctcctgcctacgatcagtaccctgtaagtgtgtgctgatgataatgatgatgaccaggagagaataaatctgttaagcatgttatttgctgcatccaataaaagagaagtcccttataactgctttaattcacttgggagatgaacatgagacacagaagtgaagcacctcagcatttgaataatgttttattttaatggacaaatactagcattcttcctaccatcatttagcggtcctcttctgctgttatctgaaaggaataaatacatcatttaaattggattattcaagaatatcaccattactgtttatagatagtcactatatataaatttaaagttccaactcatctttctttctcaaagccaataatttctgctgccattaagtgaagcagttataggaatttaaaatcatatttacaaagtccaagaaggacagaaaagaaaaaaaagagaaaacaatgctgattttaatagagctgaggaacataaaggggccagtgacaaagtgacagcagagaggaaaatgtccagcgttttgcataattgccggttcctccgacctctaggcctctgtgtgtttgtatcctcagagccacacacatattgcctgacccatgccaggggatgggcatggctgtatgtgttataagtggactctacacttgtaaccaggcagaaagcctattttcagacctttaaaaaaaaaaagctgtgctttgcacaggaactaaatatatgtgttctgaagaaatgaataagagatgaatcaaggcagctgtatatttaagaaaactggctgggatgatatgatgtcagagcaccagaaataaggcagagagtaaaaacctaagacaatcaacgtgttttttctgcgtgttgccaaacaactgcctgatcatctccgtcattcccaaacaatggactattttaatgctattgggtaaaggaaaaaccgagtaaacactgaggggtggagagagaagcagctcaagaagtaggagcagcatattcaaaggccctgaggtaggaggagatcgtattttctagggaataagagaagttcgtggtagtttgaatgtaaaaagtgacagtgagtggtatgacttgaaaataaagtagcaggaggaatgcacatcagacagggcattgcaaccgctatttggaaagtacatctttattctgtaaagaattggaaggctttgaaggattttaaatgacccaataaaataatcagttacacattttgaaaacatggggaagaagacggtacagaagcagggagactgtattcatctgttctcacgctgctatgaagaaatacctgagactgggcaatttataaacgaaagattttcattgactcgcagttccgcatggctggggaggcctcaggaaacttacagtaatggtggaaggggaagcaagcacgtccttcttcacatggcggcaggagggagaagtgcagagcaaaggagggaaaggccccttataaaaccatccgatctcatcacaactcagtcactatcatgagaacagcacagaggtaaccaccctcatgattcagttacctcccactgggtccctcccatggcacatggggattatgggaactacaatttaagatgacatttggatagggacacagccaaaccatatcagagaccattcagtcatttattcaacaaatatttattccactcctactgtgcatcaggcactattctagacattgggaatagtcataaagaatagaaacaaaaattcttgctctcatggagcttatctttgaataggagaagacagacaataaacaaattggtacaatctatagtatgttgtgtgctaagaactgttatggggaaaatatgaggcagaaaagggagggcctggccaaggggaaggagagggtaaattccacttttaatgaggaagtcacagaaatgatcactgagaagaggacatgagagcaaagacctgaaggagtgagggcatagccatgcagagacctggggaatgagcatcctgaacagaagaaccggtgactgcaaaggcccttgggtaggaacaggaagccaatgtggatggtgaggagtgagcaaggaggagagtaacaggaggttaggtcagcaataatgaggagatcatatggggcctggtgagccattgcaagaagtttgatttttactctgagacggggagttactgggattttgagcagaggatcactctgaccaccgtgtggtgaggacactgtgtatctcagggtcagaggcccagtgggatcagggaaggttggagaaaggacaaaagctagtataatcccagcaaaagacactggtggcttggtccagggggtagagatggagatggcgacaagtggtaagattcagggcatattttgaagatcaagccaagaagacttggtgtcagatgacacatgtcatataggagaaagaggacagtcaaggcttttggcaagaataactggaaggatgaattggcaattcactgaaatgtggaaaactgcaatggaatacttttggggagagaagatggatgttctgttgcatatgttatgtttggggttgccagtaagatatctgagggaaaatatcaagtagacagtttgtgaaagagtctcctcaatgccactgtgtctcctcaaatgaatgtgctgaaaagttatttaactcactcttagtaagaaactactcctagaatttattcattaattttcaaatgataatttcacacttcttgactggaatatcattttgaagattgctgataagtacaggtgtttctgtagcttattaataaaaatatgctattattaaaaaaaaagagtctggagttcaagagagaagtctgactagggtatgaatgtggtgtctgatgggcatacaccttattcaaaggtcctacataggataggattgttggagtaggtaggtagacacacgagcagggcagaagagggtgccccctcccaccaaccaccaagaatgtcagacaaccatcaggtgatggtcaggcagttgctaaactgtctctctctaaaatgataattggctgcagctggcaccaaggaacgaccgtctcccaatagatagaaaacatctggagctggtgatcagcagcttcccaatcagatctcaggagttgggcaagcgggcccaagcatgcacactaagaggcaaaatgatggagtttaacgggtatatgaccttcctctaggaacactcaactggaaaggggaaaaaaaatgcctcaaatgagcatgcgcactacttcagtaaacacctgtgcatgcagcccctcccacgtgctcgcaggccactgcgcatgcagacagcccgccccaagggaagaatcaggggagaagaaaccaaaccccagaactatgccaatgtataaaaccccaaatcaagggccaaacagggcacttggatctctcaagtcgcccgcttggccctcttccaagtgcacttcctttctaaaactttttaataaactttcactcctgctctactaaaacttgccgcagtctctccctctgccttaaacctacttctgcccctcaagccgcattctttcctctgaggaggcaaggatcaagtttgctgcagaccctttgggattttccttcagtaacaggatcaccatggaaacaggcctgaatacaaaagagaatatgcttcagggctggtctttggggactgcaagagtaaggtgccccaaaacgaggggaaaaacaggtagagaaggaaaaccgaaagagtgtgtgctggaagccaagtgttcccgggaggtgaatgaattctgtgccgagtgaagatgaggcctgagagggacaattgcctctacttccccaagggtcacgggcccagcaagagaccgtggagcagggaagacagaagtgagacagagggctcatgctaaaatagggacgggtttggaggcagcaagtgtacccatctcttttcatggggttcggagcaaagaaaagcaaaggataagaggcctcacttgagagtgaaatgaggtcaagagcagtaatttttaaagaggaggctgactaagacccaccatcttctgcaatccaggcagaagatggtgcaggtaaagcacaggtgaggatgaaccaggagctctgtgtggagctgcctcagccagggagcaggctccctctggaattcacacaaggacactgtgggtgccaacagaaagcctgtggttaccgaagtggaaaagagtgagggaatttagatagatttaggagacgaaaatccaatccacggtgcttagttgaaatgccaggggcaaaggagtctaggatgacattctaaggtaaaactcagaaatagtgaaggtttgttgaatttcgtttagaaaacaaatataggaaatgtaattagctcttgattattctaacaaatgttcctttgaaatccaggaacatggcaagtgtaatgttaggatgcctaaataaggaagagcacagcgtgtgtgtgtgtgtgtgtgtgtgtgtgtgtgtgtgtgtgtgtgtgtgtgtgaaagtctggaaggagctactcccaagatgtttagaaaaattatctttgggtggtgggatttcaggtgactttcttttattttttttctgtttactttctatgttttaattagcatgttttattttgtaacttaaaatcagaatatcagttttgttcccctaaaaaggaaatgaaaggtgacaaataatccattaggtgatttgcagttggtcaaattcttgctagattgctggctccatttttaagctctgagatatcaacatgaaaattccaatttgagtaacaaatgagataaaatattgatgtctttaaaactcataactaagatataatatttatgcttgcagattaactaaaagcaggatctacattgtcatattagttattttcaatattgttttttattgttgggacgaagcaaggaggaaaaaaagaatatactgttgaggcaaagtgaactatcattgagggcaaaaagggactcaggggaccagggaaagccatctttcctgttgatttgcatttgattagtctgtaagctaaaataaaatttattacttggtctcaatgaggccacccaaaatctcatctttaagaactatgtttggccaggagcgtcggctcacgcctgtaatcccagcactttgggaggctgaggctggcagatgacgaggtccggagatcgagatcatcctggctaatacggtgaaaccccgtctctactaaaaataccaaaaaaaaaattagcccagcgtggtagcgtgcgcctgtagtcccagctactggggatgctgagacaggagaatggcgtgaacccgggaggcggagcttacagtgagccgagatcgcgccactgcactccagcctgggcgacagagcgagactctgtttcaaaaaaaaaaaaaaaactatgtttatttttaatattgtatgctcatgattcttttatatgcccaatgtcacactttgctgacggggtgagaacatccctgcactctgcatttatttttttatttcacatagtgtttcgtgggacctgcagatgtctcctccctgcagtcctatattgtatatgctctcattctttgtgtccaggcataatcccaacttggatcatttaaactatttgcatcttcaactttgagacgacagtcactgaagttcactgtgggcagattgtaaatatgtgcgagcctggtgctgtcagccgatatgggtcagtaggcctctgagctcgtgaatccaaattcaaatattgaatgttatctgtggacatcaagggagggagtaaagtttaacagaaattggatgggcatggtggctcacgcctgtaatcccagcactttgggaggctgaggcgaacggatagcctgaggtcagaatttcgagaccagcctggccagcatggtgaaacccccatcactactgaaaatacaaaaattagccaggcgtggtggcaggtgcctgtaatgccagctactcaggaagctgaggcaggagaatcgcttgaacctgggaggcagaggttgcagtgagccaagatcgcaccattgcactccagcctgggcaagagcaagactccgtcaaaaaaaagaaagaaaagaaaagaaaggaagaaagaaagaatctaagagcaggaattgaggggatgtgacattaaaatgaaatttagggcaaacaaattactgagctttcttttttcttctataggaagcttacagattcgatacaacctgggtggcacccgagagccatacaatattgacgtagaccacaggaacatggccaatggacagccccacagtgtcaacatcacccgccacgagaagaccatctttctcaaggtatacatacatgtacatataaattacatataatatcgcattatagtccctgtccctataatgcttggccattggttttgttttgaggggatagaagtagaagagatgctttttacactttctcctacaagtgcataactagtgaagtagaaatatatataattctgacaaggaaagacaatgatgaagttgaagacatcttttagggggaaatagaataaatgtttattccgtatagtctttctggttttcccagttctagatccacatatctatcaatttactgcttttatccattgcaccatctttcttcgccaagctctcagacatctgaaacttaccgtgtttcccagcaaaggttattttggtttctccgacctacttctttcactgctccaacacaatacaaagagctgtatttttctctctctctctgcagagcctttgtcttaaaaatcctcaaaacagtctttccccagaatctcagactctgactgtgggctttcggcacacaaagggatggttttattatgacactcaaattttacttcaggttcattgacgaccccggccctcaccactgatttttacagtgaagaaaccagcttgggaaacaccatgaataaaacataatgtgaggaggtctccctgggagctaggccaagacatcaaggatgggaactgtcactgcattctctagaaggagttcaaaatagatgcctgtcaggagaaagaacagcaggaggatgctgttttgtcagtaaagtggagtgtcatttggcaggggttcagcagcctctcagacctcattctgattcggctggatgctgtgggaagttcaggttgcaaagaaaaggcacaagccctatctcttttgagcactggtggatgtcagattcataacttgatatggagtttgcgcgtggcctttagcagtaaatgctagagggcattttaaggagaggcctttcctaggaaactgacatgcactgtttcagcttactgcgccatcaatcaaaggtggcataataaggttctctcatcatggtcgacagagtcccagagcccagcacagtacctggcacacattaggggtgacaaattctttatggagtaaaccaagcccatctttaaccaagttttagtcagaaaagccagcaagtccaggagacagatcgttttacatcatttcatcaacattgtctccctcggcttttgattagagactttttccattttaagccacccaatttgtcacctcttttaaagaaagtgacttatcttgccattttaccattgcgaaataatactaaaacttaaaaagacctaaacaatggcttttcagacagtataacagcagagacccaccacagccatagaatcgtatacagtttaccctcactctctgccacagtgaattagagaaagacttgaggaaggggagaggagtggatgatttttaagacttggggctttggaggcacagaaagccagagatatagacagtggagcagccagagacctgcagagaatccaggggatgaatgggtttgggggagggtctggttctattgcccaagactattttggttgcaaatgatagaaaagcaattcagaagtaatttgttggggaaaattcctagggtaggtcatagaattatagaatttgaaaaagataaaaccaaactttgggaagagaatctagggagcctggagaattaaaactgtggactagaataccactaggtttctctctcccttccttccttccctccctctttttcattctcatctctgcctctctctgaagactggattaattacctcttactgcatgctccatctttcacatatcctaggccatagtcacaggagtactgggctcatgtcttcccaattttgttaccggaagaaggggtcctagtttcttgacactcattttaaaatcccagggaatctctgataggcctggtttgagtcacgtgctcaccttgttgggtggaagggggaacaaagacccatagtccctaatcacatctcttgattagagtggggaacttgggaaactccctcaaaagaacagaatgcagttccagaaaaaggaaggagataggacgacaggagtgaaaattttggatgcacgattctgaggtaggagaggagaaaaacctgggaagtgcttcctcgattccgccctaggttctgcacctggaagtgttgggagatccagctctccctccttctctgtcatgtaatgtaactgactgcagtaagatttctgaatgtcccaacccacgtgagggcaactaggaaagatgtcacggcctggggagctccaatctctcagcccagcctgtcccatctaccctgggacctgcccaccactgagggcaaaaagaaagtaaagatagaggtggtggaggaagacaagatgtagttcctccttatggaaaagcagatcccagggcttctcactcccatgccccactttctttcatgcagggaggccttgcagacgtggaagtaattcggaaagtgctttgcaacaccaaataacactgcaattttttcttaaaacaatctaaaaatccatcttgagaacttctacagcctcaactgtgtgtggaaagagatataataaaatgttcacagtgatcatctgtgtgtgaagggattatcaatggtttgatttcctctagagttttctatttccccattttctattataagcacatgctgcatttttataatcaaacagaaatatgaaacagccatatattctcaacctattctggtagtccccagttataataacatatgataacaaaggcatttcaataatttcaaattaatatttatttatttatagtcaaagaacaaaaataaggctaatgcaaagatgaatggtagatcacagtgctgtggaatgatgtctttggaattaaggtgaatgttgatgcatttatacatgctcaaacatataatttagatgatcctcatcagtgtttatggtgtctttaaaagcaggtttactttcgtagctgggtttggctaaagctaacattaaattaatctgcattccctcagcacacaccctgtgaaacagcactgagcacttgagggaaactgaccttggatgaaacatttgctgccaaaagacaaagtacccagtctccacatagataacagggaactgactgtagtagttatcagacaccagcgtgaaccagaacccatggcatacctccagtggcatcatttgtgaaaactcacagtcgcatcagggagaatagcttaaggcttaatgccagtcaaaatataaacaaacaaggtgcagccagagagcacctgaaaaagtctggcatgcagtgaaaaattatgtcaattagcatgaatccaaaagcgaaacattctaatcaacaattccaaagccttgtgcaactaaccctttcttcttcctttccttccttccgtcttgccatccatgtttcttttccttcctattttttcctttctctcttcccaaccacattgcacaagggatctaagggggtttacagggagaatattaaatgaaatagagagttaatggaagtcacaaaaagtaagtccccaagatcgagaaaatagaacatgattatcaggtcacaaggtcttaccacttggataaatttgactgtgaacttctcggcagccagaagtatgcaacccataaggatgaactaagccagttcctcttgagaattgaaccttttgttattatatcatttttattttatttaattccatggattgtatttactgacatagaaaatgcccatagcatactccacttatacaacatcacatacacgataacagctcacatgtattggtgcttactgtgtccaaggcaacgtgctaagcactttagacacattttctcatttagtcatcacaaaaactttatgaagtatgtgccatcattattcccatctgatgtgttttggaatgtgtccctgtccaaatctcatgtcaaattataatccccaatgttgaaggaggagcttggtgggaggtgattggaccatgggggtggatttccccctagatgttcttgtgatagtgagtgagttctcatgaggtctggttgtttaaaagtgtgtagcacctcctgctttgccctcttcctccttctcaggccatgtaagacatgcctgctacccctttgtcttctactatgattgtaagtttcctgaggtctccccagccatgcttcctgtacagcctgtagaactgtgagtcaattaaacctcttttctttataaattacccagtctcaggtagttctttatagcagtgcaagaatggactaatataccatcttagagatgtggaaattaaagttcataaagtaagatgcaacctgcccaaagttagaaagcggtaaatggccacagcatagtcgaacccaggtccgtcatacttcaaagtgtacacaggctcttaaccttgcttaatagacagatgtctggaaggatgttcacaaaattttagaagcagatacctctggctggtaagaaattaagtgatgttactgttattaccataagatagttcaaaatatgcaaaaacacagagaataataaaccatatgctatgtacccaccattgaaacattacaaatttcgacattttgccctatttcttcagatttttttaaacacagcaacaattaagagtctgttgtcctcctggttacatagtgggccccaataaaagtcagagtcaatgccctcagcagcatttctgcaaatgtatttgttacaaggctgttagatgctgaagctccttgggaaagtaaagcttcccattttgaattcagcccaaacaagtctgtagagagtgaggtagagcaggatgatggacagatgaagaggccaaaggctgagatgatgcagctttctgaaattttgaactgatcctaggataaaactagctggaaaatgataatgaataaactacatgttctttgaataattatccatgacaatcacacatttttgggtttagatgtgagttagacaatagagagttcagggatatattctctggcacagatactcggaatccatattctctacaaatcaaatgaacagatggtaaggatgtatcattttggctttcatctaactagagggccatcttatctttgccaagaagaagctaacagattttctgcaagcaaaataaggcctttcttagaaaataattctaggtcctcaggaacaaatgatgattagatccccaagttcttacaccaaaaagaggatgactttgattattttcactgggaattttcaaaacaaatgttcaaaaatatcactgaattctgttctttaaaataatataagcacggtaatttcttacctgctactaatctgaatttcaaccaaattgtataaaaacaattgcatcaattgttaattgaactaggtcctgtatataaatcttaagaactgtcagagaagtgtcaaaaacattagcaacatgtagtgtgctaggtgctagaagtagaagaaaggatacaaatattaggatgatgccagttgctatacaaattagccctcaaatgtccatgttttaacccaataaaagtctgtcttacatcagatatattttcagaaaaggaaagttctctggtctccagcagtgatgaaattgtgctgggcaggcactctgaggacctgccactgccaccaacttccctgcttccccaaccctggattaggccaaattattgtccattattcttgaagccctcctgggctccatcctctgggaggctcttccttgtgtgtgttcagccatggcctcccctgaattatgtgccggataatgtgctccttacagctgtgcagcaattatttttttttttttttttttgagacggagtcttgctctgtcaccaggctggagtgcagcggcacgatcttggctcattgcaacttccacctcccgggttcaagtgaatctcctgtgtcagtctcccaagtagctgggagtacaggcgtgtgccaccacgcccagctaattttttgtaattttagtagagacagggtttcactgtgttagccaggatggtctcgatctcctgacctcgtgatccaccctccttggcctcccaaagtgctggaattacaggtgtgagccaccgcgcctggctacagctgtgcagctttaaggcccatttcctgcaggttcaaattacactaagggttttttacactcataagccttttgtggactagatctgtgctttcttttccaatacaattccctcaaaacccaaggtggcttctgatcaatttgcttctggtaagtttcatgtgctggtaaatgcaccctaagctcttccctagacatcaatcttagacttactcaatcatttgcctccaggcgcccatgcctctctctctcaaggtaatggcagctactttggggccagtggacacaaaaggcttgggtgggaagtaaagacccttaatttaaatgttacccgtgaggctaagtcagtttgctaaacagaaatcttactgccccattgttggtcaaagcggtttgcagtgttatttcttactctctagtgtaaggctctaaatatctagacttttttctattcttttcattgattattgggaactggtcaattctttcctgaactcatctgctccatgacatgaggagcaaaaagcaactgacacacacgaccattctgtctcttttgaagaactttccttaaagctacttaggcatttagtctgccttccaggttatgtgaggtgacagttttacaaaatattttattgcatactatattagtctgtcttgcactgctataaagaaatacctgagactgagtaattcataaagaaaaaaaaggtttagttggctcacagttctgcaggctgtacaagacgcatagcagcttctgcttctggggagacctcaggaagcttagatggcagacagcaaagggaaagtaggcttgtcttacatggcaggagcaggactgagagagagtgaaggtgctacgcactttcaaacaaccagatctcatgagaactcacatattatcaggagaacagcaccaagagggtggtgctaaaccgttcatagagctctgcttccatgatcccatcaactcccaccatgacctcattttggacactgggaattacaactcaacatgagatttgagcagggacacatatccaaaccatatcacataccattcttcctctgtctttcaagtccctaatattcattcctgcaccacctgccaccttaccacaaagccaatgctacatgtgttaggtttctgttatagcagcaccctgccttaagataccaatgtatgtattcgttagggttgtattcgctgctataacaaaaaatcagaggcttaatacaaataactttctttcccacataatagtaaaatgatttctagttggaaatcgtaagcaatatataaataggctgataaaaaaggtgtttgtactaatgtccaaaaataatagagtaaaagacattgtggttctatgctataactataaggctttgaaggaaggataagatgttaacctgtgaatggggggcaagagaggacatggaagaatatttattatggaagagggagaaggagagggaagatgtgtgttccaaaagagaacatgatgttaaacaaagatgctagcagagtgactatttcatagatttcatcctgtctctatctcatgaatagaaaagaccactggagaagactcagtaaaaagtcttacctggagaaattctcactctgaaatatgtaacatcaaatggtctgaagtcatttatgaatattgaatgctgtaaagtcagtagtctgaggcacatgcagagtggtgtcaaaaattgttggaagaattttatcagcagcaaaatgagagtaattcaattatggactcctagggcagcaccaaatgttaattgacgtgaaacattggtggccgggggagccctagttcaccactttctatatgtggaaaagtgtacaattgtaaggactttcacataacctcctcaagcccagagaaaaatctctgtagacttgagagggccttaatgatcatgttaggtagtgctcaaagccctttcttacatatcgaaatgcttgcccacattgccattctcagccttatgaactggaaatagctggtgctattagtcccattatatacatgagaaaacagagattaagaagtcccaggccaggcgcggtggctcacgcctgtaatcccagcacttcgggaggccgaggcgggtggatcatgatgtcaagagatcgagaccatcctgaccaacatggtgaaaccccatctctactaaaaatacaaaaattagctggacatgggggtgcacgcctgtagtcccagctactcagggggctgagacaggagaatcgcttgaacccgggaggcagaggttgcagtgagctgagatcgtgccactgcactccagcctggtgacagagcgaaactccatctcaaaaaaaaagaagtcccaatgatgaataaggtcccagtgctcacaagagacatgatcttctctagaacccagctaaccagaccccgtttccccacttagtttgctctttgttgtctttgcaagtgggcaagagaagcaagctcactcctgttcatttgccttataaacttttgaaattttttaaaaatgtttacgcaaaattaagtcttttgaggatttgtgttttctttggagtcactaaaagcaatgactttatagcgtttcgtagggggtcataaaaccctaatttttataatcaaagagaactacaaggtccaacgttaaggctagtgtttttacagcacacagtatcatacacccataaaaattccatctcattctttaagtaaatatgaacataacctcttgtctgtccattttaggatccttcttttctgtagaaacatggagcccagactgaaattagatactgaagctcaaataaattatttaaaaatgtgtgcctttattacccttgaactttctgccaataaagaacaatactaacaagcatatggatgtaaacactcctaaaaattttactatcagaagttgttcatgcctttattaaggaaaataacacagtttggaagcactaaattttttagggatgtcagaacaaataaagaaagttgacctagctagcctagggcactgctcttgaaattacatttactgtaactccttccctttggctaatttagtttttatctactctggatgataaactcacagcctgggttgtgcaatacaagcatgcttgacagaaggcaggcaattgcaagaataatgatgagccatttgaacactctggcttcttcccttccagaagaacttttacctattatagcactggctctctattgggattcttagcaagtgtattagcacttaactttccactttaatgaacgactgacatgtataattctatggagagcataggccaatattttattagtttctgatagtattacaatggtttgagtctattgaactgatatagaagatctatgggaagagaagagagagggctacatatattgggaagttgcccattaatttggtctgtatatgagtcagaattcattttttcttctatatttctatgtatccagagaagcctgttcatgattgagagacacatcaaaaacctcatgacctcattagcttttgtaatgtcgcctctggttttgggttgagctatggctcctcggcccctgagaaagtatttgagcacgttttcattatttggttcagaaagtagcagtatttgacaaaatgtttctgaaaagaggaaacaagatgcccaactaccagagcctcagattcctctccctcccagtaccttcaaaccagcttgaagttttaaactcaggccacctccacactgagaggtctggccagcccgtatgcaaggacatggttcctaggagtgtggtggaggcgtgtggtgaagatcctgctgaagaagacagaaggttctcaagatgtccaggactcttctgttatcaatgtacttctcttctacttaaagccacatggggtccctaagaatttaacatgatgatatctaattgacattctctcttacccctgcctaccactaaacccaccacatggtgagaaagttccaaacagcaatcgtttctgaagcctgatttggataaaaccagatggtcaccaaaaccattccattaggccatttactgatgtggaatgcaattaaaattgattccactttaatcaaaataactttgaggagaacaaatatgtgctgagtatctacaatataaaagaaatttggatagataatgatgagttggtggaacagtaggtgactcatacagggatgaataaaatgtatcttttacaactcaaggagtttatattctgggaggggagaaaagatgtgtccagtcactaggcattttgtcagataatagaaacctgttccacctacttctcctctagaagacagtttgacaagtctccttatcaacatgtaaataataaaaagggtatccagcaaaagagaatattagcagtttggggtggtgataaggacacagcacgtaacgagatttccccttgaggacaatgtcagtgtaaacagagaccccacggattacaaactgttgaattcagaggttattattaagacataaatttaaaagggtctttattgataggctaccttactatattagggctctctagcaggacagaactaataggatagatgcatatataaaggggagtgtattaaggaatattgactcacacgatcacaagctgagatcccacagtagaccgtctacaagctgaggaccaaggaagccagtcagattcctaaaacctcaaaagtagggaagccaacagtacagccttcagtctgtggtcgaaggtccaagagtaccaaagctgacgaatttggagtccaatgtttgagggcaggaagcatcccagcatgggagaaagatgaaggccagaagatgcagccagtccagtccttccacgttcccctacctgcttttatcctagctgcactggcagctgattagatggtgcccacccagattgagggtgggtctgcctttcccagtctactgactcaaatggtaatctcctctggcaacaccctcacagacacacccaggaacaatactttgcatccttcaattcaaccaagttgacagtcagtattaaccatcacacttacttaatagctctgtgttctctagcaagttaatgaaatctctgttgacttaatttctaaaattggagtaagtccatcttttctaatgcagtttgtgtatgttaaatggaaatacaaaaaaaaatctagcatagtctatgacccaataaaacggtagttttcttccttcattcccaattcccttctctttcttaaaagcaaaaaataaaatagcagatgtcaggatcagtaccaacaggctctttgggactatggtttctttccattgatttgtagttcaacccattaagcatattctcagcacctagtatattcccagcatgcagcatggctgttgcctccatgagcccagtccagtagaagaaagaccatcagtcatacagatatgaaccaagtgcccattgaagtataagcttgtgctgtgggagcacagaaaagtaggggaatgaataatcctgaggaggaaagagtggatcagagcagtctcacaaaggcatttgagctgttccttcaaggtttccatggtggaggggggaggatcacattagcttatttattttttactacagagattcaacatttgcccttcataaaaattatacagaaaatatgttaagaaaataagttctaagccatcaagcccatctgatctgaaacagaaaaagactcataatgaatatgtcaacacttccacatttttcatttgttttctaaagcaatttcatctgcaaatgaattatgcactccagggctagacagtacctccattcctacactccagaaaaatgtgtttacttcgttttacatttcatgcagctcagtgggaaggcagttgcaatgcaatttctgatccagtttagggtttgagatgtcagtcctctctttctttctccagaatacggctaaagcttgtaagaccaaggttgggagttcacttttttttcctccaagtgcattaaatacataaatcacctctcaagaaagaacataaggttcctggatttctattttgtctggcatgaaaactaaagtccaatctgcaaagcatcatactgttatatccatctgcagtgcactaaaatcactctcaaagattgtaactcttggagcaaatttttagcacaatgggcagagcgggttgtttcttgcccaggtaactgaagcaggttcttatctcacctaaattcatcttctgtctgaaaagtaagtgtatctcaacatgcggtttgaggttctgaagggttccacgctgcccttccactcaggcagggagaagtcagtcctgggattgagtctgaagattttgatggacatggtcctggagcgagttcggagctagtgttaaaatgccctctagtggtcattagctgtaaccagtgagcgtagggaagggaaaatcttgtgaaactggcttgggtgtggttttctataaacaccgaccaaaaccagagtcctaggttatagcgcgggttacttgcatctgtcgcggataccgcgatggcggtaggacttggtattacttatagaaatggaagcttgccgttgcattcaaagggtacaatccagggatttttcttacgctttcacatctcactgctctgtccctgagccctgggcacacacgagagtttcaagaagtgttgactgagtgactgaatacgtgaaggaatccagtttatgaatcatggattctgtgcacattcaatgagcttggctatttgaaagtgcacaaattcttcctgctttctgaagtattaaatatatttgatttgcatcctttccccagtggtcgcttggtgagctaataattgcctttcctcttatatctttgagctgaggaaatataatcaaaatgttaaggagaggggcaacaaaccccccctttgtgggtagaagagaaggtctgggctggcagctcaagagaaaagatgaagaaaggacatccaaaaagaagtggaagtcagagaatgaataaaacacatgagcgaatggctgccatcctatccgagcatccttcctgatattgtcacccagggccaccagcagaggttacatggtgagaacagacagtagaaatcagcccactccaccgatctgactcctggtctcctggggaaatggcattaggatctaggttaccaacatcatagcttctgccagggcttgtgtgcttaaccccaacagtggaacaccacaaatgcacaggggcagtagcctccaacatcctgaccatctctgagaacctgtcctgctagcagaggggacagaggctgtacaaatcagaaagttgacgtattagtccattttcacgctgctgataaagacgtacctgagactgcgtaatttacaaaagaaaagggtttaatggaaaagtcacggttccacatggctggggaagtctcacaatcatggtggaaggcaaggaggagcaagtcacatcttacgtggatggaggcaggcaagagagagagcgcttgtggaggggaatgcctctttttaaacccgtcagatctcgtgagacttattcactatcacaagaacagcatgagaaagactggcccccatgattcgattacttcccaccaggtctctcccacaacacttgggaattcaaaatgagatttgggtagagacacagccaaaccatatcaatggataaaaggaaatgtaatgtcaactaaagacaaaaaaaaaagaaaaaagaaaaaaaaaacttttgaagaattaaagttggttttatttagaagtcttattggggactgtagactgaggcctacaacccacaagcagtcttttacagaggttttatgagactgcgccagcacagtattttagcccactgtgtatatataggtgctaggggtttagcatgtgcaaagttatatgaaacttgtttagacattatattaaagtagaactacgttaaggtttgggtgtaagggtatatctggttctagattatagaagtgtcatcactaatctccccagatgttattttatgcgtaggagaaggtaaggactaggttcatttgtcttttaaggaatatagtgacttaggtaggagagatgggggccaggtgttctgttttattttgtcgttttggagagctgtatgtcatcacagagttggggctttgtgaaattatgttggcacagagacaagcaaacttagctgcttatgtatgtgattttgtctcacaagttctctctttaggtcacaaattaactctggccatatttataaaaacaatattgattgtgttatgtagctgagaaggctgttttttaggaaggttggtaatctttagttgtagttgtaaggaatgagtattgagcccagtgtgtatatttatttattcattggaaaatatgttttggattatatttatgttttaattactaggatttgttagggtttttgatgttgcctttttgggggttttgtgtgtgtgtgttttgggtttttttttttttcaatacagggtttcactctgtcccccaggctggagtgtagtggcatgatctcagctcactgcagcctccgcctcctgggctcaagcgatcctcctgcctcagcctcccgagtagctgggaccacaggcatgagccaccacacccggctaatttttgtattttttgtagagatggggtttcaccatgttgcctaggctggtctcaaactcctgagctcaggcaatctgcccacctcagcttcccaaagtgcaggggttacaggcatgagccaccatgccaggctgttgcctttttttttaatctaatataacattttaataggacattataaggatattatagattacatatagtagtctatatttaatagtaatatgatttatagattttgaaaaaataaaaccaataaaatcagaatatgcatttgtatttttttactaattgtaccttttgtatttatatttactagtattttttatgaaaagcaattttggactggagttgattgagaatacttttagagaagaatttggaataacaactgggttgtcttgtgcatttcctgtgggcatgatgccagccttgctcttctatggcaaaggatacaggttggcacatggaggagcttggcctctgcaagcccacagacctctgggctagctactcagcaactatgtgtcctctagacacagtaacttaatctctgtgcctcagtttcctcaactgtaacatggggcgaataagagtatgtgccgacagagttgtgtgcaattaaaaaaataatatgtgtaaagtacttatggtgggatcccacctgcagttcgcctccaggaaatgttagatgctgatgtggaggaggatgaaggggaggaccagatgtttttcctgctgctggcatattctgcgcgctgctcttccttctcccaaatcctttcagcagcattttctttcttcccgagattgccaagggaacccaggcagaatgccaggaactaaacctctctggaagattgacggaagaagagctgggatttgagcaagatagagcgggctcagggtcaccatgaggttcaaggtctgcagactcccccaagctttctctcgagtagatttgaacacacaatccaagtccaaatccaaatttaataggcttctgtactgagaattcagctcagccaattgtgttagagccttaatgcacatgggtacacacacacacacactcagtgcacacaatgagcactcgtacagggccgggtcacaaaagaagcgaatgtccatcatctcccttcacttcccctggtcttttctagtctccattcctcaccatttctactgaattctcccatccctctccaccttctacttctggaacgagctccaaacatagcattaaaaagcttcagtgtttccagggaacagagcattgctgctttccataaactggcagaactggtcgttaaatggaactttcaggcattcccccacattctgaagtcactctctatgtaatgatcttcctgatacacctttctgctctttcacctggaaaagaatttgaaggatgtggttatcagtcctctgatgatgccaatgtttcgactccatcctgaatattgttattgctgccaaaacctactggtaaagtaatatcaatagagccaccgtactaaaaaggatgtgtctgctacgttgttttctttaatatcaaggactttaactatattacagttaaaatcaatagaaatgtaaccttttcaaccacataaaatgagttcatttttattattattctttttctgctgttacagtgctgtgattgcaaaagcaaccgggtcaacttaagctttattgaaagaccattaaagaaacaaactcaaactcatttaaatactgaagctggtgcattaaaaagatcaataaagtaaaagcaactggggttgctttacttaaacaccccacatacgagaatcattccacaatcacaatttgagcaaacctataaaactaggagaccagccaataaagaagaaaacgctgtttcattactaggtttagacccataaagcccttaactttagtctgattagacatactgcatttaaattttctctcagtattttaaaacatcatccagcaaagacttattgatcaatgaatgtcatttacttaggaaagccattagctccctgagttaggggaatgactcagtggtagaaagtgcagtttcatttatttaaaaataaacacaagattaggctacagtgaagggaagttctagactcacagggagtcaggaaattttctttctatccttgctgagcgtggtatcttgaacatagttatttgtattcaattgaatgtttactaccaattctgtggccatggattagacacaaacctctttgtgtgtgcctcagtttccccagaggtagaacgcattaatatccttttctccctctttctctggataagaaaacaaaaatgattgacacaaacctcttcaagttcttccttaaaaactataatacaaactataaaccttagtggtaatatgtacttagaataattttagaatcagattggtccttattggccatgagtccaacccttgaccagtctctgcttatattactagttatggaaaacatgctatttttcttcttaaaataccatttattgtgtttttctaattatacatttaaatatatttattatagaaagtacagaagagaacacagaggaaaatcaggtttgcttgtgagtcccatttaaaatcagccctcgacccttctccaccaaacccgtcttgcttactccagggcattgctgagcagttctctgtcttcgttctctactgactcattcccatcagcaaataagcatgcagatatttctcttactttaaaacaaaaatttctcctgagaccactttccccacatctttgtttttctttgcaataaaacgcccggcaatagttatctatgcttgctgtttcgggtcagcttctcccattctctctctctctctctctctctctctctctatttatttatttatttatttatttatttatttatttatttttttggagatagagtcccactctgtcgcccaggctggagtgtagttgtgcaatctcagctcactgctacctccacctcccaggttcaagcgattctcctgcctcagcctccccagtagctggaattacaggtgtgtgccaccacgcctggctaatttttgtatttttagtagagatgaagtttcatcatgctggccaggctggtctcggacccctgacctcaagcaatctgcccacctcagcctcccaaagtgctgggattacaggtgtgaaccaccatgctcagcctctttcttcagtcaactttactgaaatgtaaattgcatgcaatgaaatttacacactttaaatgtacagactgatgagttttgacagacgtgcacacccatgtagccaccaccacactcaaaatttggaatatttctaatatcccagaaggttcccctgggcccctttcccacccaccattgcccccaagcatttactgatcaaatttctatttctataaagtcacagattagttttacctgttctataatttttttttttttgagacagagtcccgccctgtcatctaggctggagtgcaatggcacagtctcagttcactgcaacctccacctcccagattcaaatgattctcctgcctcagcctcccaagtagctgggactacaggcacatggcactacacccggctaatttttgtatttttagtagagatgaggtttcactatgttgaccaggctggtcttgaactcctgacctcatgatctgcctgcctcggccttccaaagtgctgggattacaggcgtgagctaccacgcccggcctacttgttctataattttaaacaaatgtccagctcctttcattctgcataatgattctgaggttccttcttcttgtcgtgtgtatctgtggttgtttttttaattgctgggtggtaatacacttatgaatatacccccatgcatttattcattcacctcttgatggatatgtggatcattttggggatattatgactacacctgttaggaacatttgcatacacatgtatagagcagacttttttttatttctttcaagtaaatatctaggaatgaaatcaatgagtttatggtaagtgtatctttaactgttttttgatgtaatattccctctaggaagacagcagaattccagtgactccacgtagtcactagcacttgatattgtcagtctttttaattatagccattcaactggtgtgtggtagtatctcattttgggtttaattttcatttccctgatgactgatgatgtttagcgacttttcaagtgcttattgaccactggtaaatcttctttcgtgaagtgtctgttcaagcctttggcccctttttaaaattggattgtttgccttattattatgttataaggattctttacgtattctggatacaactcctttgccagatgcatgtactgtgaatattttatcctcattttttcttattcccaatcccagctgggctgctgtccaccactgcttaaagctactcttatggatactatcaatgaccttctcaccaccaaacccactggctacttcacagttctcctgctgctccacttaaaggcagcatctgaaaccagggagcccttggcttttagggaacactgctcctgtcctccttctccctcatgggccccttttgctctgtctccttcactgtttctctccttcctgacctccttcagtgggcgtgcttccagtgctttaccatttgtattcactcctgtgatgatctcatccaatgtcgtgctcttaaattttatctctgtgcctcaaactccaaattattatctcaacccaaacctcgccatgaactgccgactcacacaccaaactgactcccagatatctaactgattcttgatgtctgataaacactccgaacacaatatctccaaatctgacctcctgatctgccccttcccacaacctgccctgcttatagcctttccaatttcagctgatggcaactccatccttccagctggtcaggattaaaaccttggaatatcactagaacatcactcactggttctcacagctcacatccggtttttcagaacctcatgctggttctaccctgaaaacatccaaattctgaccagcctcccaccttgcacatctgctgctcgggctccagactccatcctgttctgcagaggcctcctgacgggtctccaagcttcctcccttgcccttgcaggagcgtctctgacatcactaccccatctgtttaaagtacgagttctctgctcaacacccactgacagtcctcgtttctctgaggacaagccaaagtctttccagtgacctgcaggactccacaggaactagccccgtgaccctccccttttcatgctacttgagcctcactggcttcatgccgggaattctcccgccttggctgctctctctgcctgagtgttctttccctgggtttctgcagggctaacccctcgaatccctcaagtcttcattgaatctccttttctcagtgaggctaccctgaccgccttatttagggttgcagtctgacttttacaccaggcctcttattgggctctaatttgagggaaaagacttcgaatttatcccctcctaccatattacatcatttactttttctctgtgtctctctatactaggaaggaagcgatatgagggttaggatttggggctttttgttcactgatgtatcctaagtacctagaacagtcagttcaaggcaccttatgggcacttgacaaacgtttcttgaatgaataaacggacctgtgatgtgactacagattccttcccacacgatgcactcggaggcccctttcttcccacccagccagtgccaggcattctgcagcaacactgctccatcatcctcttttctctgcccctgcagattgacatcttcagctccctggccaccagattatggttgggttcagctagcagaacactgcaggaaaacacagggggaggcacgagagatcggggtctgtcctgtcctcacctctatcctgcttcttcccaaagtgctgggattacaggagtgaaccaccgtacccggcctcattttacttattatagccacaggttcaaatctattcatatttttgttttgctttgttttttctgctctgtttagagtcggagtctcactctgtcatgcagactggagtgcagtcacacaatcacagctcactgcaatcttgaactcctaggctcaagcaatcctcctgcctcagcctcccaaagtgctgagatgacaggtgtgcaccaccatgctcagcccatatttattttttaacccttgttctattattacctcactctctgcaaagacttctagaaccaactacttggagttaggccaaactttacagctccaagggcacagtcctccacaagactggtctcacgtcaaaccccagctgcaagcccaggggtctccaggtgaccctcatttacaagcagctggctacaaattcagaggttcccactactccctcaggtcaataatttgctagaatgatttgcagaactcgggaaagcactatacttatgatcaagttttactataaaggatacaatccagaccggccaaagggagagatgcaggtggcaagatttgtcccaaatgcaaagcttctttgtcctaaggacacactaccctccctgcacatcagtgtgtgacaatgcccagagtattacaaaccagggacatttactgagcttcggtgtccaaagttttttttagaggtttcattacacaggcttggttgattgaatcattggccacaaaggtgaactcaatctccagtccctctgccttatctggggtttgggctcaatgctcccaactctaattgcatgtttgatgaaaagaagggagaaggaaaacataaaaaccctcctccttacatgaatgcccttctctcctcagttctcatcactgctcttctagctagctttctcttggcccaaagtacacaaatggtggctccagcaggttccctattcctggacattttcaattctaagcagcagcctcaggcattggtgatcctattggatgatccagtcacatgttcttcctaaatgccaagggtatgattatgctacattgcttggaggagtgtgcagccttgcctcattctgcagaagttcccagccatgctgtagccccagttccatatacgtaccacagccaccaacacaggagcctgtagggcacagtcagaatccatcttctttacctcttgggttcagataaccaagcaaagttctcctccaggccattttcatgttctctctgtcttcaatacacattctcctatacatgcctcatagtcctgattaggttagcaggccctgtggttgagcagacttccaatttgggaattgaatgtcagtttcttcctacatttaggcccagaatcaccctactcttgcccaatgtctttgaactgtttcttcatccagatcttttcatcccttaatacattctttctctcaagaagaatatcagtttctcaaggagagagatcctggggtctctccagacacaccgacatgtgcttgagtcccaacgtagctacacatgaactaattcgtcagccccttagggtcttgatcaggtcaccttgagccacaattttcaccaacctttcctctctgatggaaatctgaagtcctccctgggatttccaagggttctttctgcttccaggtgctttcttctgtgggtgatctctctgatccagagaatatccacccagaatgaagctcagcacttcctttggttcacaaacacacaaccgcccaaagcattcactgagcagtagcctctattgactatttcagggtcggggagaggggtacacagcacattaacaaatcactgcaagtcatagagtagatattcatgccctcaatagttcctttacccatccttctatagaggcttctcatagcccttcacgccaggcagtgccagtctttctgctttcaccccaggcagtgccaggattttgatttctcctgattcatgctccctggctccccacctgcttcctcactcatctccaggtctcccccactattatatacaataacaagctgactcttcccaaaacagggtccaagcttgctggcccagagtagtcaggtgctcaacagatgcaaaaacttggatttgaccccctttaaaggagttgtggttacaaataacaacaacaatgagaatttgggggtgatcctatgccagaataacagagatagatagatacatagatagatagatagatagatagatagatagatagatagacagatgatagatagatagatagatattgattgatagatgaaaaactgtaaccccagttttgtatagatcaatccaaactttgcatcctagcattcaaagcccttcacaacgtatcttccatttaccttctattgtcttctaccattcttttccaaaacacatcctaaggaccagcatggctggtgtcgtctaccattttttttccaaaacacatcctaaagatcaatgaggctagtgacctcaacacccttagagaaatttggtttattattcctccttcaaaacgcctccactctgccaatctactgtaccatgatgacacttattctccatattacatattttagaattaggggtaacattttacatttaattttagtagattgtcttagaatattattccttcattgtttcatgtcatgttttccaaacaagaatctaaagcgccttgagcccagctgggaacatctgcacgtcatcagctggactccagtcccagtgctcaaggtggctggaccacaaaaccacatggaagcccttgcataatgttaggaggtgtcagcaagatgatttgagtcttacgccgaggcctctctcttcccacagggggtctgcaccacccccagcagccaagttaccctgtgacagtcattcatctgtgctctgggtggcccatgggatgagtgtactactgggcaggtgtaacttcaggggcacacacagcagacatccccagctgacatgacaacctactggcttctcaagatttgactaatcatatatagtcatcccacaatatcctcggggtatcggtttcaggacccccaagtacatcaaacctcatgcatactcaaatcttgtggtcagctctgaggaacctgcatctagcaagggccgactttgcatatacgcaggtcctgcatcccaagaatactgtatttttgatccgcatttggttgaaaaaaaaatccacttgtaagcagtgcagttcaagcccatgttgtttaagggtgaactacatttctgtgaggggatcatcttcaaataaagtccttgtttctgtaccagttacagcaaaggccctgctttgagaatttaacagtcagagtagccacccacttcaaaactgaccagtcccatccgtggcaagcagacgatgtgacatcaacggctcttaccgcaccaggctaatacagttatcctggtcgtagtttcattttactgaaggccttattaaagcgcccccacacaactcagccaggaattcaccaggaaccaaatttaaacaaatcaaaccccgaaaacgtgctcaacaattcaagattacagaagggaataaagacgaaaataagaaaagcctcaatcatatttgtcatatctccatcgtttctcataataattctcaaagttctttattcctttcatttatttaattaaaaacttaggccatgcacgttggctcatacctataatcccagcactttgggaggccgaggtgggcaaatcacgaggtcaggagatcgagaccatcctggctaacacggtgaaaccccgtctcaactaaaaatacaaaaaattagccaggcttggtggcgggcacctgtagtcccagctactcaggaggctgaggcaggagaatcgcttgaacccaggaggcggaagttgcagtgagtcaagatcgtgccactgcacttcagcctgggcaacagagcaagactccatctcaaaaaaaaaaaaaaaaaaaacttaaccataacattatacaatttaagcagcatcatatttgttaatatctattttcaaaagcgactcttcctaattttattgttttcttcctcccttttccacgcatttgtttgtttttcttcctcctagaaagtcatgttctaagttatcaaaatgtgtttttcctcgagctcttcagggaaaaaatgccatataaaattaattcatgattattttatgtaaattattatctaaagtactcactatgtgtaacggttaaagttgattgttactaaagtgattctaaatatgaaagtgtataaaaccatgaactattctcacactacatctcaaagaaatttgaaatttctagtaaatttcaaatttactagaagactagttcagatattgtttttaatgatttacaatcatcttctgaattttcatttgcaagtcaaagtcacaaaactaaaagtgctacatgttttctgaccagattctctgaaataattatatagtgcttgagccattgtgctataaatatctttgaaatcaatgctattaaagaaatgctatatcagctgtgaaatgagaatttctcctcctgtccgttgacatttacaaaaattatacgaacttattgatagaaaatccgtttgcttggtttctttttaaacatcttatgctttaaataatattcagtgtttttccagtaggtggagtattagtctagataaagtaaatcactgtgtgaaagctaattttttcttcctactattttgagaaatttttgatataaaacataaatcacctaatagtttcactaattcttttaattgcatcaatatggtatgatttcaattactctagaccttaagaggcagatatattttactgattacattaccataataacaatggcataatgacaatagcagtaagtacttattatacctctcattttaaaattgcttatcaagccattagagaaacctcctgacatctctgaaacagaaattacacaacaaagaaagatctgtctcttaaatcctttctctctcgagccttaagcatttctgggaaactgcgttccttgtgagttgaatattggttcaaggctgatgctaccacttccagtccaggaatctgagacgatcactacctctccctgggattctgcttccccttctaagtttgtgaaaagatggtgataaactacatctctgaggcccctccctacctgaaaatccccaaatgaacctgaaattgacaatcttatggctgaatgtcgggagccaagtctgccgagatgttttagtacatacggcaaagatggcacttgttatacggtctggatctcaaaatggaaagtgagagaatgatgcctttccagggcaggtggacgcttcctcccaccctccatccatcaccaaaaccggtcgaagttgaatagtgccctgaaaagacaccttcaagtggtaccctagagttgtatcttcacagatgattctgctcaaagcccccagagacatgggaaaatactattccttagggccatggtagcagaacatcttcaaagaaacctcacagaactggttcaacctcctcactttacaaatgaggaaactgaagtccaagaaggcttcctaacttgataaacatccatttaacacgtggcagagccagggcccatctcctggccccattctcatccccccaggccacctctcctctcttacactggaagtctagaagctggtttgcaaggggtccctgaatgaccttccatagaggacagtgccttaccgagaagaggaaacacatactgaaaccagccacttttctctttttgccttctcacagtcaggtgattcgggtttggagagagccccagctcccatgcgcaggggattttctgtcctagaaaggcttaggcacagtggattcacctggatctcttctagttttgcagccagtttttctttcttgctcttggaccggagagcccccagacccaggcgtaggcttaggtaaagggggctcaggagacaaatctgtctgctttggccctaggctaggccacctctggccttgccaacaattaattaatacattagttaattaattaattaagtcaaagtcctccaacgtggttgagcccagctggggactggtaataaagtgagtggtttagagaataattcccagaagaagcacaaattgattattgtatttggtgaaaggacagcagaagagcattctgggcaaaagatacagctggtctaaagccctgagcacacctgggagtgcacagtgcctccccaggtgtgagagtcaggtcacagcacaggggcaaggtctaggcgagggcactgcattctcgcctctccattctacgaagatgccccctacccctctgatctccccagggccatttaatctctcccaaagaggcaaaggctccctgacttatccatctgcagttacctgcaggattcggttaactttcccttcgtaaaggcatccgccgtgaaacacaccaggcacctccaggaccggcatgcatcgctaacccagtgacaaaagcatggctgttgctcgtttattccagagttctgttaggggagagtgtttcttggcctctttcttcttcttgagtatctctataagtcggcaggatttatgagtagctcaaccaaaaacaaattaaggtagacaacgtgacctctaaatgggtcagcctcccaaatggtgtcctctcatctgcacccatggctgttcttgggattggagggatggccgcagggcttggcaatgtaggttgggagggggctggcctgctgaccctcaccctgatgggcttgtggctctcagcaatgtggtcccaaaaacaagttgcactgaaatcaagactctcagagcagagcaggggcaagtgtctcttgcatgaaaattcggagtcccagattcacgatcagccagtctccccatcgatgtggtctgggaggatggagccaagctcactcactcaaactcgatgtcaataaaatgctatgagggcttcagtccactgagtcattcacagagattcctccctctacaaacagaagttctaatggaagtaaaagctaggaatccacaccttaaacacacacacacacacacacacacagacagatttacatacagatacatacacgaacatggctcagccagtgctgacccatttaacacatgttaaatgagcaccttgcatatcacaggcccttttcatgtggatcgtaaattaactggaaggtttattagataacactacagagaaagaaatagccgaaagtccagaggtgaggtgttagccacggagctctgacaaccaggtggatttccactgcacctgctgagcccactgatcagtgtttaacaagcgtgtgttatgccacgctcctggggcaggagtggtaactgaggcagcgtccttgaacccacagggttacggtctcaccaagggaggatcaggaacagagctgcaaccctggactagcaggagagtcacacctaatcctacttctttatctcccacacatctacatttgctccatgtcctctccattatcaggaacaaagtgattctagggttaggaaggggcagaaaacatttagatgaacgtatccttgatactggggtcaaggcctgcttgttcgtattttcaattgcaaatggccctaggcttgtgtatacccttcatagaatggagattccgatggggagaaagagatggtctccactcttcaaaccctctcttctttgaagtctgtgggaatttctagtttagaaggacgggtagacacagataaggggtgcgagttgagctgataattgtttctcctacctgaagtctatctgcatcagcctcttcttatcttcagccttgggcttcaacttggagtaaataaaacattcatcagatgatatgctctaggctgggcgtggtggcctacaatcccagcatgttgggaggttgaggtgggaggatcacttgagcccaggaatttgagacaagcctggacaacatagtgagaccccatctctcctaaaaataattttaaaaattagccaggcagccaggcacggtggctcacacctgtaatcccagcactttgggaggctgaggcaggcagatcacgaggtcaggagttcaagaccagcctggccaacatggtgaaaccccatctctactaaaaatacaaaaattagctgggcatggtggcatgtgcctgtaatcccagctacttgggagactgcagcagaactgcttgaaccagaacttgggaggcagaggttgcagtgagccaagatcacaccactgcacttcagcttgggcaacaaaagcaaaactccgtcttaaaaaaaaaaaaaaaaaaaaaaaaaaaaaagccaggcatggtggtatgcacctgtggtcccagctactcggtaggctaaggtggaaggatcacttgagcctgagaagtggagtctgcagtgagctgtgactgcgccactgcactctagcctggatgacagaataagaccctgcctcaaaaaaaaaaaaaagaaactccttagtcatacacctaaagccaatctctccataatcactttattgggaataaaatgatattttgaagaaaaaagatgatatattctaaattcaatatcgctgagctaattccaagtattccctaaaattaacgattaggaaaaacagcaagaaatcctaggcctttgtctaggccatggaaaaagcgggatctgccttgaaattgtgtccttcatctcaggagatggggcccggcccctccaccggtccaggagaacccacgccatttaggtatttcttctttagcttctccactgcatccccaaagcgtaaacggctgatgaaatcccttcaaactctgccaacgcaaactgtggcttaaaaatggaaatgaatggatattgcaaaataatacctgaatagacgttaaagctttaagctccacgtgtaagacacaaggtcctgcctaaatcagtatgcttctaatggcttcatggcaaatgttgaacaagttagtgttcactcaaggttgtcctggggtacatggagtcacagtctttaattttaatgagcctctattacacaatctcttatcgcctcttaactgccagtgaaatgaccaccagctaaatgtacagcaaaatacatttctacaaaagagctcacttggaccccaaagaaattaccttgaaattattacacttaaccgtggcaaatgcaccagggttcatttgaaaagaggtggccacctggcaatacgagtgaaatcatataatatgtcatttccttaggcttttcatgttaagcttttctcgctatatctgatttaaagtattttctcttttaaatgtaaatatttaaaatgtagctgatcctctccctctcctaattgaggtgactgggctagttcaagagactgtggcctgcagctcaccgttttgtctctggagtcagagtgccagccttggtacttactctgtgactggacactttataatatcaaagatacgagatcatacctatctaatatctattcaataagacaatacatattaaaagatcagcacaaagccttgtacacagcagttgctcaatatgtgcttcctcctttttcctactattgaatcccaccagccaagaccagaactatatctgcagttggacaaagttgggtttatcccttgttgcagtgagggcttagcagtttgagtcaaacgggagctggaaaccacagtcggttaaaatggggtgataaatagaagcattaactatggcaaacagcaactccaagatgtaaggaaatccgtgcagtttcctagtggccccctagggctgagggagcccatccagggacaacctcggtgggtgtctgaccgtaatggaggcaaagctgcccctgtctcctctgacagtctccagctgggcctgagagttaagttgacgtaggagagactaacagaggaaacgcaagccaatgtttacaggcatgtgagggccttcacaggacaccaagatccaaaagcagccaggcctaagtgcttatgcaacagggtgaacaaaaagtagtaattttgaaaaagtaactaactatatggagatactaaagacaagggttattttaacaagagctttttaactgtcaaaacactttttgtttgtaccgatttccctcggcctcaactccccgcctctggagagaagaatgttcttttcttcctggtagagagaagccatcttccatatgaaagtttcatctcctgctttcaggaagaaaaggggaggtcagagtgtcctttgtgcatctgttgtttttctttttttctttgagatggagtctcactctcacccaggctggagtgcagtggcaccatctcggctcactgcaacctctgcctcccgggttcaagcgagtctcctgcttcagcctctcaagtagctgggaccacaggcgtgcaccaccatgcccggctaatttttgtcttttagtagagatggggtttcaccatgttggccaggctggtctcgaactcctgaccacaggtgatccgcccactttgccccccaaagtgctgggattataggcgtgagccaccacgcccaacgcatctgttgtttttcaagtgcctttagctcaaaattgtccccatctcaagccagcatatctggaggtggcgtgttctgaagcccttcaggaccttgctggagaaggtgtgtctgcctggcagagagcagagacccctgcttagccaagctggagctggtccggaattgctgggggagcgacaggctggctgccctctggagtgcaggtgggggagcaggcaatagcaatggcggtgggggtgagagtgaggggctaccagggcggttcagacacacgtccagaggtctgtgggcaggttgccatggctgagacgctagggtcacagagggttctcttaaaaggcctgcgactcagacaggcttcacctcatgtcctcgcactctgggcagagcctctgctatccccctcctcgagcctgtgctggaaattgcagtaagccccttcctcttgcagtgtccctccagagcacgctactgagaaagcttgacattgtgctcaccttaaaagcaaaatctttaaggaattccattgtttatcatagagcttatattgaagggtgcattgggagccaggaagcaacgagttgattgataattgacgcaaagggacccatataccttagagaatgacggggtggctctaagagtcaggaagggcttattttaggaatcaggcttatggtggggagggttcaaggaagcaggtgtctctaatcaactgggtgctctcagaaaagcagggctaattcagttattgggcctcttaatgcatttcatctgggaggcaggaagaatggagaacactaacgttgttattgaagaaattgccgggagaaagagatgttttggttttgggttgtacaaggtctgttattttttaatttcttgtattagtttcccagtgttgctgtaacaaattgccacaaacttaaggacttaaaacaacatgcatttactatctcacagttccagaggccagaagtgcaaagtcagcgcaaacggctgaagtcaatcagaaaggctggtgccttccgcaggctctgagaggagaatctgtttccttgcctttctcagcttctaagagtctcctgcgttccttgggcccttcctcacgtcactctaacttctgcttccgttgtcacatcttctctccactgcgaccctcttgcctccctcctataaagaccctggtggggacctgagacccacccagggaatccaggagaattcccctattatcttaatcacatctgtaaagcccctcttgccaaggaaggtgacgcgctctcaggtcctgagaattaggatgttatctttgggaggcatgattccgcccaccatatctccatattcagacaaaattgcagaatggtctcgtgtcacatggtcaggtcctggagagccctgatccgatgctgctgttctgaattatgttcggcagggggacagcaccacctggtggtaacactcggcaaagcatccgccgtcagctgcagagctgcttttcctttggggtcctcttgctttaacccaccttccccacaatcccactcatcccttccggccacagcccgccttcttagacacaaggcaggcaggagtatgcgagagagaagacgtaaggacgccttgctcgtggtaagatcagagactgatcggagaacgctttcctccttccctcctttgagaatttcctcaggcactgcagcttcacctttgtgaatgttgaaggctttctggatatcctcgtcacttctcatattttcctaactgagcaggtaatttggattagaactgtacagcatgacccatttaggttcctgttcactgttttgaaattaatgacttcatcaatgagttaaggctaggagtgttcattatgttttttagaaaagtcaaaaccgagcaggatcaccgagaagcaagatgacacaatcaacaatcaaaaacctctgagtagaggctattactgtgtttcaaaacaaaatatataaaagtggccgggtgcggtggctcacgcctgtaatcccagcactttgggaggccgaggtgggcggaacacaaggtcaagagttcgagaccatcctggccaacatagtgaaaccccgtctctactaaaaatacaaaaattagccgggcgtggtggcgggcgcctggagtcccagctactagggaggctgaggcaggagaatggcgtgaacccgggaggcggagcttgcagtgaaccgagatggtgcctctgcactccagcctgggcgacagagcgagactcagtcccaaaaaaaaaaaaaagaaagaaagaaaagtttatataaataaatgtaaaatttagcatttttggttaaagccatcaaccacgcagacataggaagggaatacacttatagagatcaactaggaattttattttactgtagctcagcaaaaataatataaaatggctgccaaaaagccaaggccgtctagtctggatctgcagaaacaattcaggaaaaggaaggtacctccactgtgtgggtcatgccaaacctgaggacggatttcccttcggtgctcgcgactttaaaagttgcattaacaactgttaatgtcaattatcaagatcccaccatgtattgtattgggctgtattgggcctgaggacacagaaatgtaaaaacctaaacatggaaatttaatctttaaaactgtgtactatgtatccatagaacgaaatactagtcatccatgacaaatgatttttgttgtatatttattgagacagaagacattcataatatatcgtcaagttaaaaaatatacaaaacataatatgtgttagttgggttccatccctttttacttaaaaagttgaaagaatatacattaaaagttaacattgactatcagctggcagtttttttctgcaaatctatatcattttttctataacgaacgtatattacttgtatccatttttaaagctaagaaaatagaattttgttgtatttttatcgacacagagcgacattcataatatatcatcaagttaaaaaatatacaaaacaatgtgttacttgggttccatcccttttttatttaaaaagttgaaagaaaatacattagaaattaacatttattattagcaggcaactttttttccggcaaatctgtgtttttctataatgaacatatattatttgtatccatttttaaaattctttaagaaaatagaactttgttacaaatttagttttttgttttgttttttttgttctgagatggaatcttgctgtcaccaggctggagtgcagtggcgcgatctcggctcactggaacctccacctcccaggttcaagccattcccatgctacaatctcctgagtagctgggactataggggagtgccaccacacccagctactttttgtatttttagtagagacagggtttcatcatgttggccaggatggtctcgatctcttgatctcatgatccacccacctcggcctcccaaagtgttgggattacaggcgtaagccactgccctgatcacaaatttagtttttaaattgtaagaagtatgaggtggagattatcacctcctaaggcattgccaggtaggctattggttaacaatggcattttgcatttaaccatttaacaaaagagagtaagtaaacagaagtgcggtggcagttacccatgggtgtcattagatggcagcaaagcagctagctaatatttaagagcagaaactgaagagcttttgctccaaagaaacatatatatgagattttaaatatttaagattatctgaacggaataagtgtttttgtttgtttgtttgcttccagacagggtctcactctgtcacctaggctggagcacagtggcatgaccacagctcactgcaggcttgacctcctggcctcaagctatcctcccacctcagcctctcgagtagctgtgactaccggtgcacaccaccacacccagctactttttaaaatttttatagagataatggtctcactatattgcccaggctggtcttgtactcctggactcgagagatccacaagcttcagcctcccaaaatgctgggattacaggcatgagccaccacacctggtttgttttgttaatgatgcatttgacgttatagaaaacttttcaaaatgatagccaagcatgcaaatgtttactttaatagtttttgggggtggggtgcttttggatttttgtggcaatactactcatgcacaaaaacctactgtaccagttctgtgggtcaaaaatctaaaatgttcttgagatgtgaggaccctttgactcttaaccgtgactgtgcaatgatctctaagtttctaggaagcagtttcaagattctgctgcagacagtcattaataatgaatgactattcatcgtagtatgatgtggtgatgccatttgatcacttgcctgccctctttcttcactgccactctctccttcctcccaagagcacagctagcttccagcatctttgctcatctgaaggacagttttttgcctaatcaggcccagtttgagcaaggactctggatcgtatctgcttctgagtctgtgctgctgccttcaacaagttgctgcttgttctgtctccttcctctacacaattgacgtggcccccatgggaatgcccatgtcggaaagcaatgctgtgctttcttataacccgcacctctcgtcatgctgaccttagcacgtattaaactcacttcagaaaaatgaatgcttacaaaagaatgttttccaccggggtggggggcccaaaaaaggcccagaaagctctaagagctcacagttggagaaacacatctagactgtataggtggtaaaaagacagctgagaagataaggcaggaaaagccacacagggacacaaagggcaaggccagtgattctgacaccaccattggcactttgtccacgggcaacaggatcagaaacgtgcgtcgcttccgtggttactgtctgtgcaccgttcccaacagcttcatttctctccctctgctgccaactcgcccaaccacccctgcctgtggcaggagaaatcattctcattgggataaccgagaaaactacaactgtttaccccacttgaccctcagcatttgagtgtgtgtgtgtgtatgtgtgtgtgtgtgatcatgtcacaaaataaaatgtttccgcaaaacttcattgctgtagatgtggcatattccctatcagaggctgacactggagattggatcaagcagatgttactccattaaaaagaacatggatcttaatcctgtaggtaaatcatccacagaaaatgtacatcacctggagagccgttcataaaggatcttcacttaccatcctcagattttttcaaagaaccccagcaaaggaagacatgggtttccattttctcggggtggtgttttagagtcagtgctgatgaaataagatatcagaaaaccagggttcaaagagtgatgtcatccccacagggaagatttggttccacacagggtagagacgtgcttctaaaagtgtctcttgttttcctcctgcagctcgatcattatccttctgtgagttaccatctgccaagttcatccgacaccctcttcaattctcccaagtcgctctttctgggaaaagttataggtaagaatgtggttcgttaggtataaatgcgtgctacaaatacatttgggtaatgtgagtttggattttaaaactatcaggtaaatttctcttactggggccagtcacgaatatcttctctgtacaggaaagttacgtggttgttctcggtgttgcacaagcaaagcgtcaacaaattatctttgggggaaattgctcatgtaactcattctaaagctaattcgcctttgaaatacattgtgattaggctgggcatggtgggtcacgcctgtaatcccagcactttgggaggctaaggctggtggatcacttgaggtcaggagttcgagaccagcctggccaacatggcaaaaccccgtctctactaaaaatacaaaaattagccatgcatggtggcaggtgcctgtaatcccagctactcgggaggctgaggcaggagaattgcttgaaccccggaggtggaggttgcagtgagccaagatcgtgccaccacactccagcctgggtggcagagcgagactctgtctcaaaaaaaaaaaaaaaaaacaaccaaacaaacaaaaaacacattgtgattggtaatgggggcttctaagtcagcgatggtaatggaacaaacgttgtttggtgcgtggcataaactacaacccaagcgaaggcaaatctgctccaggcttctctatgtagaatttggtctattacagacctctacctactagcaatatgtaatttaacgtttcctttgtcaaagcatatcaacatgattctatcttcctctcactcgtaagaaagcaccttgatattatttgcagataagaaggccaataaggaatttgacagtgtgacagaacacccttccccatgtgcgactgtgaattccagagtctccttgtccctctcttcaccagaggagattagcactgtgcaaagctaaaaaatgtaccatgagccacagatatgtgaagattacaccctaaatttttaaaatatcgatatgattggtgaagtattttaaaatatttaatgtgaagccaatgaattttgttcatatgaggctgtgtactgtgaactgcaatgaaaacagtaagatggtggtgatgtacaggtgggagggaggtcactcggcggccagtgtgtagaagtgatcagaatagcattaatggtaaaaatgctcacttaaaaacatgcggcaggggtcacaaaatgaggagtgagtaggagactgaacctataataaaaataatagactgggcgtggcggctcatgtctgtaatcccagcactttgggaggctgaggcaggcagatcacgaggtcaggagatcaagaccatcctggctaacacggtgaaaccccgtctctacaaaaaaatttaaaaaaattagacgggcgtggtggtgggcgtctgtagtcccagctacttgggaggctgaggcaggagaatggcgtgaacccgggaggcggagcttacagtgagccgagatcacgccactgcaccccagcctgggcgacagagggagactctgtcttaataataataataataataataatgtgcacttatgtaagatttactgtaggccaggctccagtttaagcacttgacagatattagcccattcaatcttcgtcacaattgtatgaggtagttaagattatgatctccactttttagatgagaaaactgaaccatgaagagattaaataaccgggccacctggctaatcagtggcagaaccaaaatttgaactcaggcaatcagacaccaagggagctctttactgtgctgtaatccctgtggcagttaatctagaatgcaaagagaaagacagagaggaaagattgggcaggtgataaatgctgaggctgtccaggtaagggataaagcctatatcttgtgccaggaagtggtcaagaacaaaaaggattcctgggtttagaaccaggaacacaccagtccggctggagagggaggcatccagaagagagggggaaagcaggtgtgtgcatgaagcccaagaccacacacctggtgaacaagacagtggggagtggcaagtgataaatcaaagggtggaactggaaaacaaaagagggctaacatgtattgatcactgagccttagatattgtacgatatgaaagataattaaatagcttctgcttaatcctttgcatcctgaaaacagcactcaggcacagtctcaaatctagctttggattacctcaccctgatgtccttatctgaattttctccaacactttctatagttgatgtatttttacagatcttatcaccacttttatgttctgtgaacaagaagagactttgtgacatcacatgttacacgtgtaaatataagaaacaaacgtcacaacaatccaatgaaatgagatccctgattatgaacctcattttgcagatgagaaaactgaagcagaagaaggtcaatttgacaaaagttactcaactaatactggcaaagcagagtttggaagcgaggtctctctgaagacagtccagactcttaagtgggtcaaacaatcttgtcattcatggtgaagctccagaagagggatgtatttgaaagttgagcgatgccatcagttagcaacaaaaagtggctgtttagtggagtagggccttggcattcatgagtcatggatctgagactttggtgagtacccgctttctaccagaggtactcccacggttcagttgagaatactttaaaatgttaagtgctccttcagaaccatatgattccatcaaaacaaacgctacactatgatatggtgatgttcctaaagatactacactatgatattcgtaaagtaacatcaactataaacatacccgaaaataatagactttttattactttgtggaacctgcaaagtcaaattttgatgggaatgttggatgatttctaggttctgtcactatgagtaatattctctggttcctctgttttccaggtcatgtaactagttcacatttcagcacaattccaatatactgtatggcatggaccttcaaggtcgtgaacaaataacatcataaaggccacattttctacaactaagaatgtaccttgacatcaatctgtgcaaagctaaaagtgtaccatgagcctcagatacatgaaggttacaccctgtattttttgtacacccaagaaaaatgttgctgcatacacaaactaggtaactgtgcatgtggcagtgagttacagaaagtacacataaatacctgtaaggaggtccacaattccaagatggaaatggtgttatgcaggtgagagtagttagggctccagcaatgggtccttggtgcactgacttctagtggagattatctctcatccctacaagcctgtgacctccctgcagaccaagaaagcatctcatagttccaccatatactaacaaggagcaagtgctcaataaatatttgttgaattaataaagagtaaaaggggaaggaaacagaaagatatcattgtagacgtatactgcagggtgaaagggtatggatgatcatcctaacagaatcagtaagattcgcacagaggtgagagctgcaatcctcacatatctcacagcctaaaagtaggcatctgacgatcatgaagtagaaagaatgtggacttcggaatcaggcagagcttgttagactggaatccagttctacctctgttagcattgaaatcttgaccatgttgctttcttagttgaacctctcagagcctaggttctctcctttgcaaaatggggaacacaaatgcctacttgcaggttgttaactccctgagggcagaaggcagagactttttttgaaactaatctatttacagcaggctgatcagtgcctagtatacagaaagggctcaaaaaatacttgtggagtaaatgaactactcttttaatattaagctaataacgtcttaagacatacacaacacaatgcctaatacataaataattaccatttttgatgctagctacatgccggttattatgctatatgctgtaagtacaatactgtctgcgtttctcacaacaccacagaccattgttaccctcgttgtatagaataaggagctaaggctcaaaactattaagttttcttcttaaagtggggtttcccaacagcagaactattgacattttggatcagaaaattctttattatggggctgtcttgttcattgcagaatgtttagcattctccctggcctttacccactagatataagtagcaccccaagttgtgacaaccaaaaatgtcttctaacattgctaaatgttccccaggagggaaaaattaccaccccagttgaaaaccacaggcttcaagctactcagcgagtcagcggtgacgctgagatttgaaaagcgtgatttgtgacctaagacctatgctttgcttcctgatgacacctgcaccttccagaatggtgaggaagcaaggacgaggttcttgctactctgaagctaaaattctgttaataaaattgaaggagtctcagtgaagaccccaagaagacatgtaagtgcttgagaagctaatcactggccaccccttcaagccaatactcctttgatatttgatcatttcacaggggcaggaatatgcttaaatgtctctttgaaaacaacatatacttcagtgagagacaacccatttgcattccccagttgtgtaaaaatccatctgtacagacatacagtattgaacttgcaactgatatgtactccggccaggttttgaaaccccctggagtttcatgctccaaagttgttgctttacttttataggatcagtttctgctactcagaaactgattctataaaagaaagagaagaagatggctctaaatacctaaaatgacttcacactgagctctttgatgagcactcctcaaaaagggacacagaaaaaggatgaaagaaaggctacctaatcaaggacaagtgtgatctttataaaggggatggaggatatatattcaagaaatagtagtgtgatcactgccaaccaacagcaaacttttagaacggattcttacataattctgaatgcttctagaaggaattcagaatcactagcaatcagcaaaggttcacaaaggagaaatctcactagacatagttatgtccatctttcatccctcatatccatccatcttttaccagccgagtgatgtcatagactttatctttcagcaacaaatttaatggtctctcaagaaatcttcaaggaagagaaatataacttgaagccgaaagtggggtgttctgtttgctcatgtccttttcaacatctctattaatgccttggagaaagacacaagtagcatgtttattaagtttgcaaatgtcacgaagctgagagggatggtttaatatgatggattataaaaagcatttcaaaaccatcttgacaggctagaaagatgggataaaaataataagatgaaatgtaatagaaataaacttaattgcagcacttagataaaaaaaatatatacaatcacctaaatagaagatgggagacccccagcatcatgaaaaaacttaggaaattggtttgatggaaagtctggtacaagcaatgttacatggtgatggattcttaaatgaatgtgattctgagccacactagtatgagaatcatgtccagagcgagggtattagtcatctgaggagaaaaccagataaacacaagacccgtaaaggaaatgtcagaagacctgggaatgtctgatcagaaaaaaatatgatttgagagacgagagaatcaattttcagtctttggtaactgccacatgcagggtggattagacttagttgaggcttactcagcaagactgacatggaccaaaagcagaagatatgaagaggaaaatctcagctccatataagaaagaacttcctaacaattagagcttttcaaaagtgagtggtctctactttgaggtaatgaactctctattattgagaatattcaacaaaggctaaacggaaatgtgccctgtatattaaggagttgtctggattgagtaaaaccagattagatatagcctaaataaactttgaaactttaagatttgtggtgggagtaattttcttaattaaaaaggtgaaaatgcaatattatagtagagcagggtctcctgttccattggcaactagggggataacatttagggttccttgatataaaacactgttatgatgcatgatgatagatatgaatttagaagaatatcaatgtacagcgatcaccacatcactgtgagttgtgtaattacatacacgacctgtttccaaggtggcaatatgcattttaattttatttctgagccctctttaattaatcgtttttcaaattaactatttctgccatcgctgtaaatcagagtaatataaaaccgtaatgaagtagatctattctgaaataaaaagacggtagcttctctgtgtaaacttgagaagctgtgcttagaaagaagctgaatactaatgcagtgtcgttgttgcttggctgatcattgctgttgtcagtggcgatgtctggggtggtaaaaataaagcgaacttctatccatttgaactaactagagtttgtaagtcatattggtctcagatcctcatatttcccaaactaccattatccaaagcaattccaatagaagtggctagtagcccctatattatttctattataatctaaattgtgaatatcatgatcctacacgactttttattgattaaaaagtcttattctaaggctttctaaaactttctggagctttggcaaagcctcttcacacagaaggaactgacatacttagatcttcatttgttggtgaaatcatatactgtgataaccatgctgctcacagaatatttctggccagagttatgaatggaaaagatttgtgtgatttccaggctagaacatttaagtgctcatgcaagaccctctagagtccttttatccctttggcatggtgactgacaagcctaagacagtgattttttccgtaagcctgggtccctctgtgactacagtgaacagaaaactcttgacttgtgatgaacatatagcatgagataaaaaaaactccttgctttgttaagccaccgagactatagggctgtttgttactgtggcagagccttggcctgtcctgactgaggcataaggactgacttaagggcagactttgctctcgcacccttgggtttgatctctgatatagtttggatatttgtccccaccaaaatctcatgttgaaatgtaatccccagtgttggaggtggggcctggtgggaggtgtttggatcatggtggtggaagcctcatgaatggcttgggccatctccttggtgataagtgagctctcactctgagttcacacaaaacctggatgtttaagtatgtagcacctccccccaacactcttcctctggatcctgcttttgccatgtaccctgcctgctccaccttcaccttctgccataatcataagcttcctgaggcctccccagaagcagatgccagtgctgtgcctcctataaagcctgcagaactgtgagccaattaaacctctttccttataaattacccagtctcagatgtttctttatagcagtgcaagaacagcctaatacaatctcttactctaccatttgccgattgtatgactttgtcgggttacttaacattgtgtgtatctgttttgtcatgtgtaaaataggaatagtaatggtctctgtgtcacgggattcagcaaaataatacatgtttagcggttagcacagtctctgctgcatagtatgtgtgtaatacatattagttttttactttgcataatcagcaaatgtatactcatcatatgtcagatgccaggcattgtataagtccctggaacatcattagggtccaagacaggcacagtttctgcctttggaaactttatatattcaaatccagttctcagaggtttctcttgggagaacccaaagcaagataggggatcatacaatgtatcaatatgcactgggtcacatctttagagcttcagtttctggaaaagaaggtaatggaaagtcaattagaagtaaaaagacaagagggtgggataaatgaaaagaagtatagaattctttgggagcaagtagggagggcacttgagccagtccaggagtgagggaaggcatactagaggaagtaacacagaagctgggaccctaatgaagagttagaatgatctgggtaaagcaatgggctgaagtagaggccataagggcgggggaggtcagttctccattctgcacagcagtccacccaaaactgtgtggctcaaaacagtagtttattatttctggcaattctgtggattggcagggtggttgttctgcttcatgactccaggcagggtgtaagaatgactggatagcccgaaatagcctcattcatgtggctggcagcaagtgctggctgcccaggagctctttggggccacgagccaggggctgagttctcccccaagggttccaaatcatggctgcttgggctacctcatggcatggtggctgggctccaagaaggagctttccaaacagcaaatgtagaagctgaaggtctctaagagccaccattcttgccatatgctattgaccaaaatctgggttccagcccatgttccaagagagaggaagcagaccctacctcttggtggcatcgtagccaggtcacattgcaaagaaacatgccatgggagttacggttgtgacatctttggaaacacagtgtgctatgagagaaatttgaggaaccacaagttgcattcagaatggtggaaagtcggatgtgaagatgcaagtgataaaaatgctgcagcataagcagggttcagatcaaaggcggctttaccagcagggccacatgtcctgctttgcctgggacagacccaagctactcctgccaggacaagagtacattattagcagtgcccacttttactctaaaaataggactacgcagttgtatgatcacctatcttatttgggtgttcccaggagaaaccctgcagaattcgatttgaatataagaagtttacctgggagacaatcccataaaacaagcaggaaagtagagacatgaaacagggaaagggatggagcattatcaagccactcaccactgtgggcacctggaacataatcccaccaggacactctggaagacagtgcgagacatgcctccgagtgtcccaaccaaggcaggaggaagccagggcatctcgccacctcctcccatcctgcagtgatgagggctgcttcctgcggtactaactccccagcacttccagcttgtcccgtgtttacacccaacacactgctgaggccagaggaaagtgcagatgacagcgaatcgcagtcagtggttcctggagcaggactgaggtgaatgccgggcactgacagcatctgccatattacggatctatttataagccatgttaaggttttaatgttatcttaggggttaaaggaagtcaaggaaggatgttttttaatccatagaataacgtgatcagattgacactttagccagataataccatctgcagagtgcaaaatgcataacaggaagtgagaagctgcagggagaccaaattggaggttgccatggttatcacagaattgcacattgtaatgcacaaagcagctcacatatgtggagaaaatgcaatgtctttatctgtgtctgatgatgtcgtattccttctgggtagcaaaggcaaataagctaaacatccaggctggtttaaagctgattctgacttaatcatttcaaaattccttcctggttgtgctctgtccctcatgaataaaaatgttcagtttctcgaagagcctttcccgtcctctgcttctttctataaggtggggaccaggtgtacagaatataaaaggagacaggcagcaacatgtctagctttagcattctaatgataccgtgggcagggagagacctggatgcatgctggtccttgagtttgcatggccaggcatctgctggcctccagcccagtgtcctgtgtccctgagtgctcttctggccttggagcttaaatctgtggttgatgaacttagagtccctttctttgactcaggcagtgttcccagggagcacctgccatcctgccctttgcttacttgctgtgccctcaatctcccacttgagagacccctaagccctaagtctctttcgcatcctccgtctccccatggcaggttgtcgtcagctatcaagcagtgagggctttcatctaaggcttcatgctgcacgagaatgagatgatgcacgtgaggaccagagaccctgtcggcttactcttcttccctctctacatgaggcttggctgccccatgttagtacaggaccgccccccaccaccaccgaccccctacacagcaacctctccccagagccccagactgggaagcaaggcaagagccctaaacccttggtcccatccgtcatcctttagaaacccacttctgctctctgggccaaagcttagctctcgtctctcctgctgtatctcctccttttctcatagtcttctagggcattaagaaagaaaaaagaaaaaaagaaaaaaagctttgcttttacttcctacaaaaaaaaaaagcaccatctaacaaatagctccaaaactcaattgcttaaaacaacaattctatttttatcactaatctgcgggtcagctaagggccgaagtttctcttgtacacctctcgtcttcctcctgggaccagggagttagcatgggcatgtttttctctggcagagacacgagagaacaagccactcacacaagcactttccaggcctttggtcttgtcacatccactaacatctgattatctaaactaagtcatgtggccaaatccatagtcgaggagaagagaaacttgctttcccttcagtgaagaaaacagcaaagtcacatggcaaaggccacggatacagggaagggtaaagaattaggggccgccaatgccatcttccatacttaggaggtggatgcaggagaactctgtgacctcctcgatgtactaaaaagcctgagtaggcccggctcggtggctcacgcctgtaatcccagcactttggaaagccgaggcaggcagatcacgaggtcaggagattgtgaccatcctggctaacatggcgaaaccctgtcgctactaaaaaatacaaaaaaaaattagccgggcgtggtggtggtcacctgtagtcccagctactcgggaggctgaggcaggagaatggcgtgaacccaggaggtggagcttgcagtaagccgagatcgcgccactgcactccagcctgggcaacagagtgagactacatctcaaaaaaaaaaaaaaaaaaagcctgagcaaaggaacttggggaaatcattttattcactcaaaagtatgttcagtgctcacatgtaccaggtgctaggcacagaacaatggataaaacagaaatctcttatctttatgaaccatgtactctcatgagcatagacagaatgagaaaagagttgtgtaatataaatgttagcaataagtgctatgaagaaaagtaaaagaggcttagcaggaaagcatgttacaatggccaggaaagtcgtctttgagaaggcaatatttaagcagtggccttaacaaagtgagaaagctggctgtgtggacatctgctggaaaagccttccaggaagagagaatggcagtccaaaggctgtgaggtagggacacgcctggcttgttcaaggacaggaagaaaaccaacatggctggaatacagccatcaagggacagagtggcaggagacagatgaagtcagagggttagccagcagccaattgcacagatggagaccatcatggagagtctgcattttattctaaatgagatgagaaacagtagaaggttttgagcacataagtaacacaatccaatttacatattagaaaggtcattccagctgtgggatgctgtattaactgcagaaggggtgggctgatataggggcaggatggacactaagagaccatttcaaatacagttgtggagtccatgtgagagttagaggcacgtgcaccaacgcaacagcagtgatggtgatggagaaatctttggactaggaacacactgaagtcagagcccatagtatttggtgatcaaccggatgtggtgggtgagagaaagagaagtcaaagagcgtttcccaaggtattggcctgaatagctggcccagtggtggggctgcctactacaatgaggtaccctgggagagaagtagtttaggaactgtggaataaaaattaagacttccattctagccacattcaaggctattccatggatgcatagcactgaggtgcatatcagaaaccgaacaccacctgtaacacggccttttcctgtctttatctcccatctcctcctcaggcagatagatgtcttggcttgactaggacattgatcgttactgggaaaggcaaaaaagaaaaaagcctattgataaatgtcagaatatatctccattataaagtcattcaggtgttgcatatgaacgcaatgatgaagaagaacaaattactgatacacaaaacagcttggatgaatctctagagaatcgtgccaatggaaaaaaagccagtcccaaaaggttacatacccaatgatcccatttatgcaacatttttgaaatgacaaaattttacaattgaggacagattagtgagtgccaagggttagtgactaggacaggagggaaggggaaggaagagaggtgtggttagaaaaggaaaacaaggaggccgggcatggtggctgactcctgcaatctcagcactttgggaggctgaggcaggaagatcacttgaggtcaggagttcgagaccagcctggccaacatggtgaaatctgtctctactaaaaatataaaaattagccaggcatggtggcccatgcctgtagtcccagctactcgggaggctgaggcaggagaattgcttgagcccgggagacagagaagttgcagtgagccaagatcatgctactgtactgcatctaggtgacagagctagactccatctcaaaaatttaaaaataaaaaagagagattcttctgcagtgggaattattcattatcctgactatggtggtggatgcacagacctacacagatgataaaattgtgcagaatcacatttgcacacatacaagagtacaaaatctgaaataagatcattggatcatatcaatgttaatatcctgatggtgacactgtactcctgatttgcaaaatgtctccaatggggaaactgggcaaaatacacaggggatctctctgtacaatttcttacaactacatgtgattctacaatggactcaattaaagtttcaattagaaaaagcaataaaaagccgggcacggtggctcatgcttgtaatcccagcactttggaaggctgaggcaggtggatcgcctcaggtcaggagtttcagaccagcctagtcaacacggcaaaaccccgtctctactaaaaatacaaaaattagccaggcaagatggcgggagcctgtaatctcagctacttgggaggctgaggcaggagaatcgcttgaacctaggagacggaagttgcagtgagcagagatcacaccactggactccagcctgggcaacagagggagactccatctcaaaaaaaaaagaaaaaagaaaaggaaaagcaataaaagtaaaagaagaccaagtccaccttcttctgtggagccatttattcatgggatatttagtcagtgtctcctaggggctagtgccatccaccctgggggagcgtgagggacaggagagggacctgcagcgattaagccaccggttctacccattccctctttactttcctgcgctagccagtagagattaggaaatatgtgggaattattatttatttacagcttagaattttgtagttcttttagagtcattattgaagagaatgattaatataatacatttctttaaaaaggagctagagaaaatggggtagattaaactgcctgcaacttctctcaaggaaagtccccgatggcagcttatcgccttgtgatttatctctacctcctaagagtagaatgcagcaaaattgataaatgaacaaatggcaaatagttaattgaaatttctggtcagttgcctttgcgttttactataaggacagaagcagcaggaaagcactgatgagaaagctcattgaagtgataggtgagaaataatatttaaactgaagagaagaaattatgtcctgtttttcatatcctaaagaacatatagcgtagtcttaatgtccagaatcttctcaaggctgaaggaaatctattttaaaagaattcactcagggagttctagttcaaggctggcttctcattcttttttaattgcattgactttcattcttagacatttattgggctttattattattattgccttatagaatcataggaggccctaagaaataatttgttgaaactttgtcacattacagctgaggaaaatgaggcccagaaaggttaaatgaagccaaggtcacatagctggtacttcacaacgtttcctttttttttttttttttttgagacggagtctcactctgtcaccaggttggagtgcaatggcgtgatctcagctcactgcaacctccacctcccgggttcaagcaattctcctgtgagtagctgagactacaggctcacaccaccacacccggctaatttttgtatttttagtagagacagggttttaccacatgagccaggatggtctcgatctcctgacctcatgatccacccacctcggcctcctaaagttctgggattacagtcataagccaccacacccagccttcaacgatattttcaatataatatactgtcaatatcagaataatctttgcttatcacccaaatgtgtctttaacaaggacaataaataattaatacatcataacctgcaaacatactctcaatatctagataaaacagctgcaaaggcaaatcttgtcataagtgtaggctggaagaggatattttgaacattgagggtcaggctcaatacaggctctgtgtcagaacacctgcaattccagttgcctcacctgctcgaggagctttaacaggtttcttacaaatctcagcttcagttttcttaaccgtgaaatgagaatgatagtagtgccaatatcataagctttgttaggaagatgaaagatgctatcatgaatgtaaagggcttatcacacagcctggcacacagtgagtgtccagtacgtcttaggcagtatcattacatctaatctttgacttttagctaatacaaataaagaatggctgactccaatcctgggtcactcataaaaagaacactcaaacaatgaaaaactgaaaaaaacttttgattgaaaaccaattggtatcatcatctttccatggtttccaaaattaaattatttttaattaacaaaagcaacccccaccaaaaaaaatcatttattgttaaaatgtgatgagagatcagaagttctgttttaatcacatttttagtatttggttaaagaagattgtcaaaacacttatttctgtcccaaatcttcaactcacctgtctttgacacacaacatacttttgcatacccaattgttttgaaataaacaaacatttgaaagccaaaattctaggctgggctcggtagctcacacctgtaatcccagcactttgggaggccaaggcaggtggatcacctgaggtcaggagttcgagaccagcctggccaacatggtgaaatcccatctctactttaaaaaactacaaaaattagccaggtatggtggcaggcacctgtaagctcagctacttgggaggctgaggcaggagaattgcttaaacccaggaggtggagttgcagtgagccaccaagatcatgccattgcactccagcctgggcaacaaaagcaactctgtctcaaaaaaaaaaaaaaaaaaagaaagaaagaaagaaagaaagaaagaaagaaagaaagaaagaaagaaaggaaggaaggaaggaaagaaagaaagaattcttattattataacattccaaagtattccagaaggcatggaaaatttttgaatttcttatttatatacagttgatcattattattatacatttcatatttacaaattcacctactctctaaaatttatttagaacctcaaaagtagtattcttggtgcttttgtggttatttgcagacatgtgctgtgcagcaaacaatttgtcatcaatgtgtacattctcatttgaagtcaaacaaggtgatgcccttgccttctagtttcagctcttataccataaacaagtatcatttttgtagtctattcagtgccattttttttgcattcttgtgtttttattggtgattttactgtataaaatggcccctaagtggagtgctgaaatgctatctattgctcctaagcacaagacgctgcgatctgtcctgtggagaaaatacatctgttagatgagctgtctttaggcatgactgattgtgctggcagccatgagctcaatgttaataaatcaacaacatttatttcaaaactgaatattaaataagatacacacataaagcaaggtaatgtattggttggttgataaaatgttatgaccagatgcttgcaggaacctaaccctgtatttactttaggaacaatgttttagtattcactaattgagtgttagcagcaactgtatgaaacatagctactgcaaatagtgacaattgactgaattatttttaacctgcatcacatgaatatgatgatacattatgtttttatattattttgcagtttaaacagctcttccacagctattatcacacatgatgttcatggagcgttacagtttggctgtgtccccacccaaatctcatcttgaattgtagctcccataattcccacttgttgtgggagggacccgatgggagataattgaatcatgggggggtttcccccatactgttctcatggtagtgaagaagtctcatgagatctgatggttttataaggggtttccctttcagttggctctcattctctcttgcctgctgccatgtaagatgtgcctttcaccttctgccatgattatgaggcctccccagccatgtggaactgtgagtccattaaacctctttttctctgtaaattacccagtctcaggtacgtctttatcagcaaagtgaaaacagactaatacatggaggtaagaggagagtggttactgctcagcacactagattaacaagtccaactaaggctacccaggtagagcctggtcttctccttctggtttgtgaaatctcatggtgcttcctatagcataaagactggctgtcactcaacaccactgcatcttaaggtccgtggaaggggaacataacatgtttcgaagaaaaaggtctgggctacaaagaccctttatgtaatcttgctaacgacctggaatttaaactttggagagcttgaaggttaacaaattggaataaaaagaaatcaagtcactccttgtttgaatgctctgaagaacaaaacagaaaaacacaatgaaatggtaacagaagaagcagatttggcccaataagtctatgctttgaatgttcctccggcactaacatggccacatttgggaagactggcatccccacagacttttctgtagcactttgaaggaagaatagagcagttgtagaaaaacaaatgtttgcatgaaagaattattcacctcttaaaaatctatagggtgtgaataatcctgctataaaaagcattaaatgtttataacagatatttaatgggactgttatgttttttggcagcaagcatggctagattttgaatgtcacagctctgtgctctggtgataagacagactctgtggtctaagtaagaattattttcctgcttttaaatgtagctgttaaaaaacaataaagtgtatttatctaaggaagataatcttctaaaagaagtgtttaataatttttaattcacaatttatactacttctccaaggtaaattcattttccaactgttactccatctttattgactgggaggaattagcattcaaaatacaaactcagaggttaaagcaaagccatacacagaagtgagccttattccattgtcttttatcacgggtgccagatttatttaacagactgtctttcagtctcacttacagtaactagacaggtactatggaggacagtgtatgttgaatgccttccaagtgtgaaacacctgcctggcactacattatcactaattctaaccttgcaagtaagtgcctacttaaatctgcacttgacatgtgaggaaagaggctctgaagttttaaagtgacatgtgccaagtcatatagctagtaagtggtagaaccatgattccagggtgggtctttctgtgcttgttggtttatttactgtctgtgtttgttttatgaaagagaaaagaccctgagagataggcatagtacaggtgacccttgaacaacaggagaattaggggtgctgaccccctatgcagtcaaaattttgcatacaacttttggcttttcagaaacttactgccaatagcttactgttgaccagaagccttactgataacatgaacagttgataaagacatattttgtatatgtattatatactgtattcttataataaattaagctagagaaaagaaaacattattaggaaaatcataggaaagataaaatacatttattattccttaaatggaagtggaacatcataaaggtcttcatcctcatcttcttcacattgagtaggctgaggaggaggaagaggggttagtcttactgtctcagggttggcagaggcaggagaaaatctacatataagtagactcatgcagtttaaaaccatattgttcaagggtcaactgtgtatttatttgatgcttcagaaaggggaccatgtcaattcctgataaggttctctcctctttccttttcctccatctctctgtgtcgatcctagtgctctcatcggcttttaaccagtagaggtctccaaactgtcttgtggcagcctgggctccctatacacagaaagacctggcttcaaaattctggttaatatgggaagtgcattaggaagtagaaaggaaagaaaagtcaaacaataaggaaaggattaatataaatcataaattaattttgtgggcctaattactattttttaaaacactgtaagttttagtagattttcttactctaagttatagaagtcaaaccctaaaacacgttaaaaaaaatctttttgttatttcttaactattacggttattttatcaaaattaattaatatcaaattaatgataatacaaaggaagtcacattattaattaaacaaagtgacttagccttgcaaataaaacactatcgtgtggattaatagtttgaaggtttaactttacagccttttcaattgactgtaatttagagcatttttaggttcacagaaaaatggagcaaaaagtacagagagtttccatatactccctcacccctccccacgttatacatagtttctcttcttattaacatctttctacgtcatgtttttggtgttacatacttgccacacatagtaccctaataatctcttgggccgtacattctctgggtttggacaaatgtgtaatgacacagatccaccattacagtatcatagagagtggttcccctgccctaaaagtcctctgtctccacctgttcatccctccctcccctctgctccttgcccggtccccaggcaactactgatctttttcctgcctctatagctttgccttttccagaatgtcatataattggaatcatacaatatgtacccttttcagattagcttctttcactttgtaaaatacatctaagtttccttcaggtcatggcttgatagatcatttcttttgattgataaataatatttcagccttatttttgtaaggaaaaaatcaaatcaagaaactaaagtttgaacagccactatagaaaaaaaggcaaaagtcaataaacaaaaacaattgttcagcttcgctcataattgtatacacctcccagctcttggactaggtaacatcagtggccagcaagatgccaccgattgagtgattgtttttatttcatgccatgtgacccattggccctccttttcctgacacatttataatcatcttaatcccaaagcaactgtttttaacaaatatgcatatatcctctgattttctgttgctataacagaatacccaagagtgggtaatttataaagaaaatgactttatttcattcatgcttctggaggctgggaagtccaaggtccaggggccacttctggtgaggactttcttgctgtgtcatggcatggtggagggcatcacatggtgagaaggcaagaccaggtcaactcaggtctctcttcctctttctttctttctttttttctttttttttttttgaattggagtttcactcttgttgcccaggctggagtgcaatggcatgatgttggctcactgcaacctccacctcccgggttcaattgattctcctacttcagcctccggagtagctgggattacaggcacgtgccaccacgcccagctaatttttgtatttttactagagatggggtttcaccatgttggccaggatggtctcaatctcttgacttcgtgatcggcccgccttggccccccaaagtgcggggattacaggcgtgagccaccgcgcccaacctttttttttttcttttcttttttttttttaaagacagtctcacactgtcgcccgggctggagtgcaatggcacaatcttggctcactgcaagctccgcctcccagcttcaagtgattctcctgcctcagcctcccaagtagctgggattacaggcgcccaccaccatgcccagctacttttttgtatttttagtagaggcggggtttcactatgttggccaagctggtctcaaactcctgacttcgtgatctgcccgcctcatcctcccaaagtgctgggattaaaggcatgagccaccgcgccccgcctctcttcctctttctttaaagccaccagccccatcatagggacccaccgcgatgaccttatctaattctaattacctcccaaaggccccacctccaaataccatcaacatatgaatttagagattaagtgtccaacacatgaaatttgggggacacattcaaaccatagcatcttctttaagataatgtaaaactattaaattaaataatagagtagaaatcacactaataatttgtgggtctattcagattatatattacctaataatttttacctattttttgaaaattgttccaatcattccccctgcttccttttcaaaagagtcaaacatagccagttaatttaaggtatctgcaaaacctttccaccaagacttttatggtacagagaagtgactcataagccacaattcaattaaatttagcaaatatttcttggacaacaactacatgcttgaggttggcatggggacctgtttttaaacctcctgttcattctactttgactttttaattacaacagattaaaatatcttattcagcaaaaaaaaaaaaaaaaaaaaaaaaagagagaaaaacccactttgtatattgaatttttgaatacacaagagaagtgcaactcagggtggtgggattcctacctagcaggcctgtctccctttgattaccccaatattccaaaggtgcaggttttgtgcaccaggcactctaataggaccctatcagctcagcgctctcagaaatttcagttgtctcccagcccctagaaagtcacaatagctccagggttgtgcttaacgggccatagtgggaggatttggaaaggagaaggtgaatcttttctgtgaaaagcaggtggaggaaactgaagagtggggagaagagaggtggatgctgacctgaattgtgttttcaggagcaggaagagtgtgctctctgcttaagagatgacctgaatggcaagactacatgtcactcggatggtacacagatactgtcttgatgggagttttcggaacagatttgtcctcccagggtgaaatagcagagagatttgaggcagccctcaactagagtatgaccaataaacaccaacttacttggtttttttcattcctttttccctgtgtccaagaagcaaaatgataatgtaaatgaatacacacacactcacactcacacacacacacacacacaccccatgttggggaggcgggtaaaggaacagaattgctctcagcaaacactggtggcatcaaaatagccaatcatgctgatggctgccacacagctcatggaagccttccacaggccagctctcttgctgttggctggctggacttcccagctcagtccctcacctctttacaggacaaggcacaccagaaaccaaggctgttgggggaggcagcaacagagaccagacgttccctctgcacacacatgatgtcatcaatagaaactctgctgatgatgaacccactttcacacaaaccttttaaagcctgagttattttttgcaatgacaaaaataacaaaccacatttttttaaatagcttccttaataataatggaaattcaggtgacattaatgaaaattgtagcacatgttcaaatcagaatctatgttcagtgttatatgcagaatataaagggatttcttttctcaattgatagaaaagggaagtcatatttaagtagtcacggtatcctagatttttaatatagcaacataattgaataatattttgatgtatctggttttagtatttaaggtgataaaatattaaatttaagcttaaaattaaaaatagaggaaaaagaaaaacaaattgaactgaagtgaaaatgtttcttgttttttaaaaaatcattgtacataacagttttcaccttcacttttagaaatcaaagcacaaccctctatcacatggtaaagagagtcagccatacggaaaaccaagctgattgttctattcctgtgcaaattctaaccctaaaatatttctctataatgctttaagaaagaaagtaaatctggaaaacattttttatcattttgaaagctgcctttgttttgattctcattgtgaaggtcaaggataggagaatttccagagatgggaatttatcttcactttatgctatcatttcagaatgaatagtgatcaggttctaaataatgcattccacaggtgtgagcaaccaccctatcactttctatcttcatgtggctggtgcctacaacactaaatttctgcggcagattcattaaggtagttgttcattccctgtcgtaattagacctcccatttcagccttttatgtcaaatccatcactcaccctggcactcaggctcacctctttacaaagcccttccctggtgctattctggctctaaacacaggtgataaatgtgtcagcatggggcacattcctgtccctgaggaccatcaatcgttaagtacagagagctttttccagcagccttctaagatttatacccatgaggatattatttttgtggctgcatgaaggagaattattacttgaaatgggttttgtgaaaggatggttttggtgttgctttggcaccattttaagcttcttttcacaaaattgaccggcgcaagtcagaatttatacttctatgaatgtagatcttcaccatctgatggtgctgagtcctacagagaagaggatttgagactttccagtttttagagatctctacgatgtgcaagaatctagatattcagaggccgtactgacttcaatcacatggtaaattagtatatgagagttcgcagtaataaaagaagtatgtaagtgatcagcatgtgttttagtcagggttctctagagggacagaactaatggaatatatatataatatatatatatataaaatatggaatttattattaagtaataactcacacgatcacaaggtcccacaatagaccatctgcaggctgaagagcaaggagagacagtccgagttccaaaactgaagaacttggagtccaatgttccagggcaggaagcatccagcacaagagaaagatgtaggctgggaggctaggccaagtctccctcttcacatttttctgcctgcttgtattctagccgtgctggcagctgattagatggtgcccacccagattaagggtaggtctgcctttcccagcccactgactcaaatggtaatctcctttggcaacaccctcacagatacacccaggaccaatactttgcatccttcagtccaatcaagttgacagttagtattaaccctcacagcatgggaggtaatgcgtatgttaaatagtttcatttagccatttcacaaggtatacagattccaaaacgtcatgttgtataccacaaatatatgaaatttctacttgtcaatttttgaaaaaaaatgtttaaaagaagtgtgtaaataacttcttactttagatataaaatcttaagggccaggaaaagggcaccaaaatccagcctttgacatctcagaagaagcgatgattaatttcatttcattctgttggtttccatggagtggtgctgggtggtgaggcaaacacagcagcaggaatgttaacatttcatattttagccctaggagtaaagaaaaaaaacatgtcccagatcagcactagctagaaccaggaaaccccaaaagcaaaggtttttttgttttgttttgttttgttctgttttttgtaaaagacaggttttcacaaaggaagttttccaaattctatgtataagagagttgagaaggaagatttttctctcttcttgcccaggaggacaaagggaagagtaccacattaagccattcaggtaaagtgaagcttattgaacgctgtggattaggataaaactaatagagttttcatttttaagccagttcagatattcagattaattatggacgtaatgtagaaaataccaatttctgcaagttctacatttcatgtgaaatcccaaagaggttaaagctgatgggttttaactgatgaaaacacgtgcctctgattaaaaatgtttgtagtgatgaaaacaaagcatgctagagttacagtgtgtagcatgctgaagccaccagcagagcttaggggacaaaaacaactgtttcctaagagaaaaagaggctgagtatcttaagcctggggaagggaaaagacagtagttagcaagctcaggttagccactggtattactctacctttcatgagactcttcactggggaggttggggagattcggtctcacctaaaggagagatggctcgtgaacccaaggatgctgcagggaccctggccaccacttgcagcccaaacactagaatgaggaccagagaacacaatctagctgcttcccatccatcccctccaccccaacatctggtctcagcaacttcctctgccctacactgggatgccctccttagttgatctgaaccatgcagcagatgaaacatgttggcctgacaagtagcagatggctataattgcctgagccatctacaccggcaaatttttcttctttatttgcatatgagtaaaatttttcccagtgttaaattatggtgtgagtagagattttttgagggagcacagcgcagttgtatagacatcgtgattgacaaaaaataaataaaataaaataaaataaatgaccaaaatctgctaaatgaatttgaattaaattgttctaatgctttctttttctttgtaactcttcaccaccacctcaatacatgcattcctggacattcacgcatacactcacacaaacacaagcatggtattttttgtgtgtgagacactgaaggtagcatgaaatagcaaccaaaaaatctgcagtattaaagttagatatgacttggtttgacttgcaaatcaactgcctcactagtaagatgacttctggtatatggatatgtctctcagttttacaggcttgttttcggattaatggtaatagatgtaaagaattgggcacggtaagtcaatagtcaaagctattcaacaaattgaggacaaacaaggaaatgggttaggaattggtctgtagccagtctcagaaatgttgtattaacctttgggatataatcccccaaaattaaagtatagtgattcatccaaaagtacaaagtgttactagcaagatggatgaggatttccatctaacatttttcatcttcttatccctgacacattattaaaacacctagattttggtaaaagaggagaagtcatgtcttggacaggattgaaggttgtgtcaacattccctatgctttcaagtttcagctttagaatccaaaacccccgggcacagtggctcacatctgtaatcccagcactttgggaggtcgaggcaggcacatcacttgaggtcaggagttcaagacaagcctagccaacatggtgaaacctcatttctactaaaaatatggaaattagccagtcatggtggcgcattactataatcgcagctactcgggaggctgaggcaggagaaccgcttgaacccgggaggcagaggctgcaataagccgagattgcattgcaccactgcattccagcctgggcagcagagcgaggctccatctcaaaaaaaaaaaaaaaaaaaaaaaaaaaagaatctaaaccctttggttcacagatggaaggaaaaagcaggcggtgtttcctattctatgtgtatgccatgcctcgagccctgaacaggctactcatctgtggccaatattatattataacctctccattctcagaaggcacgctggcacccatctctgcaagaaaggcatcaaattgtctgtaagtcacagaaatgttattgtattgtcctttattcattcattcagaatatactctctaagcatctatgtaattaaacattactaagcttacatataattaacctcgaaataataactaagcattgttagttttatgtacggctaacttaagaaataaactcactttctagttatcagttttggaaaacaaaagagctctataacaattttgaattaatcaaaaattggagaattctgtgcaaacctataatccttccctctttagggtgaaggagcaacgctttgtgttacttaaagacacactttgccattgtgattaactataataacttttaaaataatcaaaaaatcagtccactttcttgtctatttgtgtattgatcactaaaattattgtacctagtatgatcaactttgtatattactgtatttcattaaagcagctaacttctcttgtccagacataagagaacactagaagacaaaaaacaaaaaacttttatgaatctcttttccttacgaacactaattttataccattttaacatacttgaggtggcaaaaataaacatatatatattatatcatccaaaagtatttgcatattttattaatctattgccattctaagaattcagggtaagttaaaattgtgttaccaaccagcatttattttgcatctgtttcactcttgaaattgtctaggtttcaaagattattaactaattaacttcaccatttgtctaaggtcttaaagttagttaaggatcgagaaatcacaatttttgcaaacataatgaatcctgacacccagcacttaaaaattttacaaaacttaattcttttaaaaatccattaccttttcatttaattgactataattatatgtatgtatgtgtatacattttaaacaagttataaaatttgtgatgatccacttataaaaacaatgtaggaaatttaggaacttaaatgataagaaatttatcattggtctcgtacaaaccaaagtattattctgatattatttttatatgataaatgaaattgtaaagaccctaagtcgtgctcaaggctcttcttctatcttgaactaaggttttcttcttatcttgtaactatagtaacaagggctacaaaagaagcacagcttaatatttttccttttagacatttttgactactaatatggtacagatattcctaatgtgcactcataatgatagagtgaatattttaatcaattttttttttttttgagacggagtctcgctctgtcgcccaggcgggagtgctgtggcgcagtctcggctcactgcaagctccgcctcccgggttcaccccattctcctgcctcagcctcccgagtagctgggactaccggtgcccgccaccgcgcctggctaattttttgtatttttagtagagacagggtttcaccgtgttagccaggatggtctccatctcctgacctcgtgatccatccgcctcggcctcccaaagtgctgggattccagacatgagccaacgcgcccggcctcaattaatttttaaagcttcccaaaagaggataaaagaggaggaaaggaatagaaaaaaaagcagtgatagggacccaccttcagacacttaagacattatcgctgtaaaaagcaagggtcttccctctgcaagaagaggcactaaatgtttagattcaggaaaacccactgtgacatatatacatgcaaaagataactcttacagctggtataaacaattatttgggccttgaaattcttatcaagtaacatgtttaaaagccagactttattaatcctcaaagaacagaaatgtagaaaacagcatttacaatgagccaaaaactctctctttttagattgcaagacaggtatctcttcatgaagctttctccaatttttgttctcaggcaccactcaaatgaacaatcttgttcatgtcaaaaaggtccccaaaatagccactgcagttcaaaattatcctgtgaaattggctaggcatggtagctcacatctgtaatcctagcactgaggtgggcagattgcctgagatcaggagtttgagaccagcctgggcaacacagtgagaccccccccgcccaccatctctactaaaatacaaaaaattatccaggcatagtggcatacgcctgtagtcccagctactcgggaggctgaggcatgagaattgcttgcacccgggggtggagttcgcagtgagccaagatcacgctgctgcacttcagcctgggaaacagagcaagactctgtctcaaaaaaaaaaaaaaaaaaaaaaattatcccgtgaaattctgccagttaaagacacaagcatgtcagttaaggtgatgtgagaaagcaggtatttgtttcatagaaaatgcccagttttaggatggatcagacactatgagcactgcaatagatcctcccacacgatggtgcccgtgcagcctactttcgtcaggacttggccaaagcccattccagggtcagacaatcccttctgatttcaagaagcctaatctaaacaaagcagctctcaggaaaagaacaagaccgacgaaaaagttcttctaagggttcgaaatcatgacccaagtcaaagtttattcaaagaatgttgattgtaggagaacttctgaactcctaggcccctgagccagctcaagaactgacttacctggcttatgctcattgtctccctagagaccttttgttttagagataaagaacactcaagacactgtacaagcagacagtccataggaacatatatctgtagactggtaaacagtatcaccaaagaacaataaaaatcagatcagataaccaaaaagtcactggtaaccttattcctaggggaagaaaaaaaaagagagggagatagagaaaaggaaggaaggaaggaaggaaggaaggaaggaaggaaggaaaaacacctaaagtggaaggacctcagcagaatatggaagctcagttcagcatgaacttctcctagcacgggcagtgtggttacatcagacagctagagacacaaagggtctcaaataagcacactaaaattggtgagtggagggttcccatccaagactgtagggctcacagatgaatattgatggatcttcaaatgcagagattaattacagccactgaccactaggagcccacctgtagtagaacaaatgtgggattcttcactcattgcatcatgggagattgctcattatggagaaccatagaggcatctcagtaagaggatgctggaaagagggtgctagaaagtgctattcggttttcagtaggtgatttggggagagttaaaaaaagtaggggtttgttctagattggatactgtcaggaagcaggtaattctgtgattgaatatcttaatttttttttatcttgaagacagtagagaaaaacagctgtagttggtaaagaagtagaaatgatgtgtattaggctgagaaggggtatgttggatcattttcgtgttctggccagttttcttttttcagtgctgagacatgtctcatggagtgacctcttctttgcctttccccatgaaggtcacggaatgaccttgtctgatgttgagttctgtgaaatggatcaccccaaacagaagcacacatggcctggctgtgagttcccaaacagctccccacgctcaagagctgcttttctttctcattctcaattaaggattgaaggaggacacaaaaacacgatcaccaaaggaaaatgaaacaaatttaaagtaaataaaactcagcaaaaagaaaaactacaggaaaagaaaagtaactgtaggaaacaataatgacttagccctaaatggcatttacgtggtcttaatcatatgtgaccttaatcctataaaaaccaaattgtgatctaactccaagtccaacctgcctattttagaagggtagttggatggtgctagtggatggtggggaggagagtagaagctaactcatcatcatccgtattggtaagtgaatagataatgcctaaaaacatgtcatgaaattgcaatgtcaccacatcatttggagatacgtttttaagtcagcctaaagggttgaaaatgcttctaggctggggcaacgggagggcagagcatagaagatggtaatgattcctgaccatccttcaagaactatctttctaattttttccatcttctcctccctgctttattctagccacactggcagctgattagatggtgcccacccagattgagggtgggtctgcctctcccagcccactgactcaaatgctaatttcctttggcaacaccctcacagacacacccaggaacaatactttacatccaaccaagttccaaggattggaacaatacaatcaagttgacactgaatattaaccatcacacacagacatatatacatatatatatattttttagacagggtctcactctgtcacccaggctggagtcgagtggtacaatcatggcttactgcagcctgaagcctcaacctcctcagctcaggtgatcctcccacctcagcctcccaagtaactgggactacaggcacacaccactacaccttgctaatttttgtattttttgtaaagatggggtctcactaagttgtctatggctggtctcgaactcctgggctcaagtgatccacccactgtggtctcctaaagtaagtcatggcacctggccaactttttttttttttctttttttttgagatggagtcttgctctgtcgcctaggctggagtgcagtggcacgatctcagctcaccacaatctctgcctcccaggttcacgcctttctcccacctcagcctcctgagtagctgggactacaggcgcccacgaccacgcctggctaatgttttgtatttttagtagagacagggcttcaccgtgttagccagaatggtctcaatctcccgaccttgtgatgtgccctcctcagcctcccaaaatgctggtattacagatgtgagccaccacacccggccccaactttttaaaaatattttttaaagaatgagtagaagtagccaggtgaagaaaagaaaaggaaacagagctgggaaaaggtgtgttgcatcagaaactagaggagggcatttcgcctggaccagagaaagttctgatgagccaggaaggctgggcagagccagctcaggccaggcaggcgcgattctgcacaggacaggatgcacctccaatgaccacgtgtttctaggttgtttccaagggcacacagataacagtcaacgatttttttctgactagccactgtagtgatcgctgctgtgtgaccctccacactttgcttccctcgggcctcagctccgcctcattccactggcctaataattaactcagccttattttcccaacctaattgtttcacagaccaaaagaaatattggatgtaaggtacaatttgaaaagtgtaatgtgctctagaaatgcataaaatgatgattagtctttgcccagtaggctttttagcttaataagctcctgataatacagaaatcactgtgagcaactggcagagaaagatttttccatttctcttaactaagaaaagagatttaaagtcactttggagagctaacactaaataataataactgccaaaggaattgatttgatgctgaatataggcttgtgtaaggaggtaaaaaactgtccactaaagttaatgctcatagtaagaggcctctgtccttgaattcaccttgagagagttgaacagggataacggattttcaaggacacacatctacagagaaagggcgtatggaaatggaaaagggaaagctgctcctagtgtttttgctgaattgttctctttctctaacccagcaggagagatgctaaaggagattttgtcaaagaaaatccttgacattggattcttaaaagccttatggtttcatgataggccctttaccaaggattcttaagggacaaccttatgttagagagaaacaaagtcctgaatcatatttcctcctctctggaatatatgtagaaatacaagtgagaagataaatacatgtgtaaaaagaaaattcatactttcatactcgttatatgttatgattaaatgttgattgcatttggagagcatcagcatatgaactatattacagaaaggatagtcttttgtttcatggcttaaatcttcttttctcaataagattaaggggctagctaagattataatcataacaattttttttttttcactgagtttccaccctgtgaggaacactaggctaagcaggaaaaaaaaaaaaaaaagtcactaaaagaccctaggctatttgtacaccaatgttcatagcagcattattcacaatagcaaaaaggtggaaagaaccaagtgtccatagatggacagataaacaaaatgtggtctatacgtacaacatgggtgaaccttaacattgtgttaagggaaataagccagttacaaaaggacaaatactgtatgattccatttctatgagatacttagaggagttgaaatcatagacacagaaagtcagatggtgactgccaggggctgggaggagggacaatggggagttgttgtttaatgggtatagagtttcaattttgcaagacaaagaatttccagagatgggtggtggtgatggtgcacaacaatgtgaatacacttaatgccactgacttgtacatttaaaagtaggttaaaatgggccaggcatggtggctcacacctgtaatcccagcactttgggaggccgaggtgggtggatcacgaggtcaggagtttgagaccagcctgactaacatggtgaaaccgcgtctgtactaaaaatacaaaaattggctgggcatggtggcatgcgcctgtaatcccagctactcaggaggctgaggcaggagaatcactggaacccgggatgcggaggttgtagttagccaagatcatgccacttcacttcagcctgggtgacaaggcgagactccgtctaaaaaaaaaaaaaaatatatatatatatataggttaaaatgtccattttatgttaggtacattttactgcataaaaaaaaaaaagactatgggcaagccatttccttcctctgtgcctcagtgacattatctgtgaaataaatgtgtagaaacagatggactccaaggatgcattcaactctgcaagtctgtgtgtctaaacatcccctctgtcctcatggggtttagcagcaagttggagagatgaaatgcagtaataaaatgtaaaatacttctagttaatgttttaagtacccaattagtgattttttaaaaaggaatatgtattcccttgagaagggatagagcagaaatctggaggacagctttgtggagatagaactggaccatgcccacttcaagaagtatgtagctcggatgtggatctgtgccagtgggatggccttaacaaaggtgagcaggcttcaccacaccagggggtccgtagaacagcaagaagatgagcctgttggtggtagaaggcttctgcgtcaaagtgaagcattgaggaggacccatgggtgactttgagggactctgaatggaagagagtggatggacgagacacctggcctatccacaaactggccctatagccttgaataatcactgggacctcagttcctgctgtatgacaccaaggctagctcctttacaagacggaagcacagcctagctgatcttgctcttcctgctggaaaactccatgattctctttgccttccaggcaacagacacataagattcctgctgccaggtcactgctggatgctggactccagcagtgacaggccccgaacctgcccttgtgaaggccactttcttagtggtggtggctcatctagcaggctgaggaatgtacaaaggatgtgtaagaaaatctacctagcagtagggtatataatgagttaaagaactgagcttctactggcaatgagaccagccagggtaatgttgcaaaagtttagatgtacattaagacccagaagggctgaacttggttaggggagaggaacatgaaatgaaaagtctaatgcatgaaccctagaaccacatgaatattaaagctcacactgaagtatctgtgcctccttctcccttgccctgccctttttcagcctcccaaagctgcacccattcctcctgtgtccccaatatcccctatgccatgtgatgtggtttgactctgtgtccccacccaaatctcatctcgaactgtaatccccatgtgtcaaggggggacctggtgggagatggttggatcatgagggtggtttgccccgcgctgttctcaggatagtgagtgagttctcacaagatctgatggttttataaggggctcttctcccttagctttcgcttctctcgcctgcctacttccccttccccatgattgtaagtttcatgagacctccccagccatgtggaactgtgaatcaattaaacctctttcctttataaattactcagtctcgattattctttttttttttttttttttttttgagattgagtctctctctgtcacccaggctggagtgcagtggcaggatctcggctcactgcaacctctgcctcccaggttcaagcaattctcctgcctcagcttcctgagtagcttggattacaggcgcctactactgtgtctggctaatttttgtatttttagtagaggcagagtttcacatgttggccatagttgatcctgatctctcaggagatctgcccaccttggcctcccaaagcacttggattacaggcatgagccttgggtatttctttatagcagtgtgaaaatggactaatacaccatggtaactgggtcccatacatcctgaaaatactaatagaacaaatattcccactcctgaaatttaacttgatcctgaagacgaaggatttccttgagctcataaatggaagtggttcatcttccaggtagagaatgcaaggtagattggttttgttcacaggggtcatgcagagctaagcacatagaaggtgctcagtaagcacctgctgaacatactgaagtgacatagccaggcagagacgggtaggtggacagccaacacgccatgagagctggaagggcgcatcctctcttaggagcttgggccctggccagctgactcagcttcaagctctgctagtacataagtccctcggggcctataagcttggccgtgttgcagctgaaatttctgctgaataaggtcatacatactaagctgagaatgcaatagtgagaatggctccttctttttcgcatcccagaccccagaatagaaatatttaccatcacgtctggatgataatatcaataaattatcagacattgcacgtattaagaaaagctcattttctggaaattgtccttattgtcctaattgggaattatcttgaagccgtggatagaaaatgacctttcagattgctgggacaaagcccaagtctaaattggaaacgtgtttaatggctaagacagcccacttccagattaattatggatgcttttccatttcaagattacattaggaaggaaagttgtcactgggtggaatgtgagtctccactgcatccttttaagataaataagttgaagtttgaagaaaatttgagattacttttggttaagtgaataaaatctgtttagcgaactctttgaagttgtggattgcctgggaatctacaaatctgcaacctccctccctctagatacattcagagggtagaagagaagtcatttaaaaccttatgcttgacttcttgcttcctgccttggtttttaaccaaaactaaaaataaaaaagccaaaagagaggaaacttgataggttcaaaacaggaaattagattgtaagcaaagaaattgtccaaacatcgaaaaaaggaacacatcaaagaagggaggtgctttgtttttatactttgttatcgtcctggaaaaaaatgtctgctgcctctgataatacatattaacacttcttttttacttagcttttatttttatcaaagtaataaaatcatcttgtttaaagtgtcaaatagttctatatggcttattaggataaacaaccatccaattttcaagatttttttttcctttggcatttgtctttaattctctaaatatattcacctgctacttgaggggtcagcagacttttcctgtaaagagcaaaacaatgagtattttaggctttgagagccatagagtctctgttgcagttactcacctctgctgttgtagcacaaaagcagctgtgggcaatatgtaaatgagtgggtgtagctgggtgctgaaaaaactttatctacaaacacaggtggctgcacagtgggctgtcctttaccgtctcctaggctactccttgagtttctgtttttagtcagtcactgttaggtgactcctgactatggaagatgaggattaggctctttcacagccaacaactctcctccatggcctcctcccctccatgtttttcctttaccttcacccttccaataggatggtttactggctttggatagatccgtatgcagtgtttacatcatcatgcttttcataactgaaccatataatagagctgtgtttccagccaggcatggtggttcattcctataatcccagtgctttgggaggcacaggtgagggattgcttgaggccaggagttcaagatcaacctgggcaacatagtgtgagatcctgtctctacaaaaaaaaaaaaaaaagacattaacttggtattatggtgcacacctgtagtcccagctacttgggaggctgaagtgggaggatcacttgagcccaggaattggagactgcagcgagctatgatagcaacactgcactccagcctgggtgaaagaccaaggccctgtctcaaaaaaaaaaaaaaaaaaaaaaaaaaaaaagtttcctttcctacacactattttgttttccttaatcattatattgttttcttcatttgcttaattttttgtgaactaattatgaattgaaactcaagctctctctcaattttaaaatcttccctcaacatattgcagccaatataagaggaactcaccatttcattttcttggaaacttctaccccagagcattctggctggataggccttgggcatctgtattagtctgtcttccttctgctataaagaactacatgagactgggtaatttatgaagaaaagaggtttaattgactcgcagttctgcagggttaacaggaagtctggctaagacgcctcaggaaacttataatcacagcagaaggtgaaggggaagtaagcatgtcttacctctgcaaagcaggagaaagcgagtgagctgggatctgccacatacttttaaaccatcagatctcttgagaacccactcacactatcatgagaacagcaagggagaaatccgcccccatgatccaatcatctcccaccaggaccctcccctgacacatgggattacaattcaaggtgagatttgcgggggggacacagagccaagccgtatcaccatccttgcatctctcttctccatcatcatagataacctgggcctccggatggcatgagatccccctcctacccggcttccatgactttctctttgttgatctagtcccttttttaaaaatggagccatccttctgtagcttcctgagaaagaatgaacgggaatcacattttctgaaacattgcaagtctgaaaatgtctttattctccctcatgcttaattgaaatcagactgaatacagaattctcatttagaaattatttcccttcacaagtttgaaggaatttgtctattgtcaatagtattgctctcaagaaattcaatgccattttcattctcaattctttatttgaactcggtgtttttctctctggaagattttaggttcttattcttctttgttttctgaaatctcatgaatattatttgatgtgggtctattttgactctttctgttggaacacacatggggccttttaatctggaaagccgttcttgaactctaggaatagattttgggggacaatttcttctttcatttcctgttctctcttcccagaatttgttattcagctatcagaccccatggactgatctgttattttcttatattttctttcatttgttcaatttctttggctgttgtttcccctattctctgaacaatgttctcaaatttacatttcataaactctcattgagtttttcacttctttttttatgttctgaatttccaagagctctattttttgttctttgaatgttcctttttttaaatcatctgttctcatttcatgaaagcaatatgttatctctcagaaggtattaatgacggttttctcccaagtgtttcttttcctactcagcctctttttccttcaagtagctttctttggttggttggttggtgtgtgtgtgtgtgtgtgtatatgtgtattttcgtttgtttttcttttttcttctcctgtgtttgagacatgtcctcaaatgcctggttcccctttagctgacacccacatttaagattgaggcactacaaatatgactgaaagttctgtgcacacaaatggggcctgtcacccgtgggcttcagtggctgagttgtttcatcgggaagcccctgatgttgcatcactgagatttttgtcttgggctgattgaaagctccagagaagaattttctgccctgttgcctggagggtagacacctggctgtcactgttctcacagctaagaaggaagaggactgcgaggttcaagattcagtgtgtaaatgttgactgaagatccctgttttcagtacagagcccctgccgtcctatgcctagagtcctccaactgagagtctctgtgtccttcccagagaatacatcgttcctcttctgccagagtgaggggaggacagatgcctggggtagggatctggggatataaatgttcttcacgagcttccagtgagttcttctgtttttagcttcacataaacacacatatccagtggaaactcttgccatcaactgcacaaataatgggcggctttgcagtgccaaccgggctacttctcagcactctccacctcagtgcaagcatctgtccttggatatgctgccacttaagatggttctgctgtttttcagctctaaaaaggttgttatcatcccctgcctcatgatttgttcttacaccttcgtatatcttaacacttcattccccttttcacgggctttatgaagaagcagtggtaaatgtaggtgctcaatccaccatctttaatgggaatccttcagcacttctattttagaaaaaatgtgaagaatatacatagagactgggcatggtagcgcatgccggtaatcccagcaatttgggaggcggaggtgggcagatcacctgagttccggagtttgagatcagcctgggcaacatgacaaaacccacccatctctacaaaaaaaacacaaaaattgcccaggcatcgtggcacacacctgtagtcccagctaatggggatgctgaggcaggagaattgcttgagcctgggagatggaggttgcagtgagctgagatcacaccactgcactctaacctgtttgacagagtgagaccctgtctcaaaaaaaagaatatactaaacactcatttcacaatattcttgacttattaaagctggagtcatggcataatttccaatttgcttttcaaaagaattaattgatcagctaagaaatttacaagtaatttttttcaaatagtgaggtcccttagtattaaaatgaatttcatgttttaatactaggtttttcctcccacgcagtgaattttcttcttgctttaagaagaaatgctctggagagaatataaaattatatatagttgtgtatgaattatatgtcataggattacatataattatatgtaaatataattacaattataacattaatacatgttcactgcagaaaacttggaaaaaaacaaagagtttaagagaaacttcataatcaactgtattctcaacaactacagaaagcttaaccaatgatttgtccgtatccatggctaagaacgaatgtacctacacatctgtgccatttttaaattggcattttttaaaaagtagatccaattttagaagtttgaaatctagtttaaaagcctagattttatttttttccattttaacctatttatgtatttatttatttatttatttatttatttatttatttattatactttaagttctggggtacatgtacggaacgtgcagttttgttacataggtatacacgtgccatggtggtttgctgtacccatcaacctgtcatctacattaggtatttctcctaatgctatccctcccctagccctcccaccccccaataggccccggtgtgtgatgtccccctccctatgtccatgtgttctcattgttcagctcccacctgtgagtgagaacatgcagtgtttggttttctgttcttgggttagtttgctgagaatgatggtttccagcttcatccaagtccctgcaaaggacgtgaactcatccttttttatggctgcatagtgttccatggtgtatatgtgccacattttctttatccattctatcattgatgggcatttgggttggttccaactctttgctattgtgaatagtgccgcaataaacatacatgtgcatgtgtctttatagtagaatgacttataatcctttgggtatatagccagtaatgggattgctgggtcaaatggtatttctggttctagattcttgaggaatctccacaaagcctagattttctagaggaattcttctctatacagggaaacattgcagtaatgagtttaagtgcattgattctttaagcacatttgtttgttgaatgataagactattgtatgtagttcacatccagccccctacacaactgtcacacacaatgaccttcacagtgattcatgcctgaacaacattgtttcctttgcctttaggcttgcaattgggaactcattttatttgaaccaaagccttcagtcgagatgaaaattttcactcacgtctgtgtgaagagaccaccaaacaggctttgtgtgagcaacaaggctgtttatttcacctgggtgcaggcgggctgagtccaaaaagagagtcagcaaagggagatggggtggggccattttataagattcgggtaagtaaaggaaaattacagtcaaaggggggttattcgctggtggcaggagtgggggtcacagggtgctcagtaggggagcttttgagccaggatgagccaggagaaggaatttcacacgataatgtcatcagttaaggcatgaacaggccattttcacttcttttgtggtggaatgtcatgagttaaggcaggaaccggccatctggatgtatacgtgcaggtcacaggggatatgatggcttagccttgggctcagaggcctgacattcctgtcttcttatattagtaagaaaaataaaatgaaatagtggtaaagtgttgggacggcaaaaattttggggggtggtatggagagataatgggcgatgtttcttagggctgcttcgagcgggattaggggcggcatgggaacctagagtgggagagattaagctgaaggaagattttgtggtaaggggtgatattgtggggttgttagaagaaacatttgtagtgtagaattattggtgatggcctggatacgattttgtataaattgaaaaactatacggaataagagaaggagaaaaacaggtattaaaagactaagaattgggaggacctaggacatctaactagagagtgtccaagggggttcagcataattacttacttggttggcaagtttttgggctctatccttgagttttttatgttgtcatacaccaggccagattgatttaggtaaaaacaacactcttcatttaagaatatacagagtcctcctttttcagcagtgagtaagtcaaggcctcagcggttttggaggacaactgcagctaaagagtcaacttgggcctggaggactgataaagtttgtgatatgtctgtgatgctagcagagaagtcattagagaggctacggaaggtcgtgacagaggttgaaatgcctgctattccagtaccgagagcaatagtagaggcagaaagtcctaaaccgacaagcaagggaattagtggaataactcttttttgtcgtgtcggtgtcatgaggggaacagggagctcttcggtcctatttgcaaattgaattttgggggtaaggaagactagtgtgcatgtgcctgtccaattagcaggtagacacatgtaggtagaggatccacagacgaagagaccttgtgcgaggcaaaactggagatgcaaagtaaagagaagcagtgctgaaaggggtgtcttgtacccagactcctaggtatccagctagggtggcagccgtcagaggttgtaatggggattgatgaagtaactgcgtagagggggaggttcgatttacatggtgtgtgagaaaacgttgagtatctacgagcaacctttcactgttattttcggggctgggtataagtaaacaagaagagggctttggagatgaagagtaaaggaacatcgagaaggtgaaagattacctaagggaattccagtaggtctttgctgagagatacataaaggagcggccacaggaatagtagtttgtgttgtgagaggtctaaatatggggggagtagagttgatataaggagaaaggtttttcaagtaagtgtggaggagggtggcagcttgctgatgtgaaatgtctggggaggtcttgctggacctgtctagaaagtaaatgagttcttcaggagggtaaaagtgagggctgttaaaggaagtctggaggtgtagggagacaggaggtgttgcctagtctgcatgtaaggtggggacaactgtgtaggccctggaagaaagggaaatgcaaagccagtggttgtttgctaaggagggattagaaacggctaggagagaatgagtaaggttgatagcgtggtggagatagctggggagaggtagagggtggcagaggaatgggaatgagaataaaagtgagtataaaagtaaagaatagaacttcgtcagggtgaaagtactggagggtcccctgccagcaaagatcatctatccactctaagagggagttaagagttgccagtcctgggcgggggcaaatcctcgagcttgatgtgtagggaagggagggggcctgaataatccctgaagagtagcagaatagcagatggaagaagttacttccttgaggatagatttccacgatggaaagaaaatgagaggttctaagaggcaggctagtggcttgtactatagcatagcctgcctttgctggtgtgtggcgattaggcctggtggaactgccatcaataaaccaagtgtgttcagggtgaggaacaggaaagaaggaaatacggggaaatggggtgaatgtcaagtggatcagagagatacagtcataggggtcaggtgtggtatctggaatactgtgtgaggccggattgaagtctgggccaggaacaatggtaattgtgggagattcaacaaagagtgagtacacctgaaggagccggggagcagaaagtatatgcatcaggtgggagaaagaaaatagatcttggaagttatgagaactgtagacagtgagtttaacacagtttgtgattttttgggcctctaaaagtattaaagcagtggcagcagctgcatgcagacatgagggctaggctaaaacagtaaggtcatagttgtttggacagaaaggctacagggtgctgtcccggctcttgtgtaagaattctgaccgcactaaccatgcctaggaaggaaaggaattgttgttttgtagaagggattggggtttgggagattagccagacacgatcagcagggaaagcacgtgtgtttttatgataattatgctgagacaggtaacagatgaggaagaaatttgggcttgactgaagtaatgggagctgtctgtgaagccttgcggcagtacagcccaggtaatttgctgagcctgatgggtgtgagggtcagtccaagtgaaagcaaagagaggctgggatgaagggtgcaaaggaatagtaaagaaagcatgtttgagatccagaacagaataatgggttgtggagggaagtattgaggataggagagtatatgggtttggcaccacagggtggataggcaaaacaatttggttgataaggcgcagatcctgaactaacctgtaagccttgtctggttttaggacaggtaaaatgggggaattgtaaggggagtttataggctttaaaaggccatgctgtaacaggcaagtgataacagactttaatccttttaaagcatgctgtgggatgggatattggcattgagggggtaagggtgattaggttttaatgggatggtaaggggtgcatgatcggtcgctaaggagggagtagtggtgtcctatacttgtgggttaaggtggggagatacaagtgggggggatgtgaaggaggcgttgaactgggggaaaaggtggcaatgaggtgtggctgtagcccaggaatagtcagggaagcagataatttagttaaagtgtctcggcctaataagggaactgggcaggttggggataactaaaaaggagtgcttaaaagagtattgtctaagttggcaccagagttggggagttttaagaggtttagaagcctggccatcaatacccacaacagttacggaggcaagggaaacaggcccttgaaaagaaggtaatgtggagtgggtagcctccatattgattaagaaggggacagacttgctctccactgtgagaattaccagaagatcggcatccgtgatagtctagggggcttccgaggtgatcgggcagcgtccgtcttcagccactaagccaagaagatctgggaaggagtcagagagccttaggccagagttccaggggctctgggagtggctgccaggtgagttgaacagtccgattttcagtggggtcccgcacagatgggacatggcttaggaggaatcctgggctgcgggcattccttggcccagtggccagatttccagcacttgtagcaagctcccgggggagaaggttctggaggaatccctggcagctgcagttcaggcgtttggagttcttgtgtgctggagatatggctggggtttgtctcacagtggaggcaaggaattgcaactcagaaatacattgctacttggctgcctctactctattattgtacaccttgaaggcaaggttaattaagtcctgttgtggggtctgagcaccggaatttaatttttggagtttatttaatgtcgggagcagattgggtaataaaatgtatattgagaataagacggccttttgaccttttagggtctagggctataaagcgtctcagggttgctgccaaacaagccatgaactggactgggtttttatatttgatgaaaaagagcctaaatgctatctgatttgggataaggaaaaggagcattaaccttgactatgcctttagctccagccacctttttaagaggaaattgctgggcaggttggggagagcttgtcactgaacgaaactgtaagccggactgggtgtgaggaggggagatgataaaaggattgtagggtggaggagtggaggctgaggaagaattggaacctagctcgacctggcaaggaggggagaggtcagatgggtctgtagaaaaggaagattagaaagactcagcgacacttggggttgggactaaggggacaggtgggagggaaagaaggaagatttgggacaagttgcattgggaacagagactagggagggaccgatgtgtaaaagagtgcctggatgtcaggcacctcagaccatttgcctattttatgacaagaattatttagatcttgtaggatggaaaaattgaaagtgccattttctggctatttggaaccactgtcaagtttgtactggggtcaagcggcattgcagaagaaaataaggcatttaggttttaggtcaggtgtgagttgaagaggttttaggtttttaagaacacaggctaagggagaagaagggggaatggagggtggaagcttgcccatagtgaaggaggcaagcccagagaaaagagcaagtagagacatggagagaaggggtcggggggttcttgccccctagaaaagcggtacttgccgctgagggtgaaggagaaggagttggggggttcttgccccccagaaaagcagagaaggggtagagacatggagagaaggggttagggggttcttgccctccagaaaagcggtacttgccactaagggtgaaggaccaaggcaggcgtccccgtgtggtcagatgcctctgaaatgtgggtgaataatcaggcaggcgtccccatgtgattaaacaccaagggaagactgtcttccccagtccgtgaccggtgccggagttttgggtccacagataaaacgtgtctccttcgtctctaccagaaaaggaaaggaactgaaattaagagaagggagagattgaagtgtggcaccaagattgaaaggagaaagaggttgagggatagtgagagaggttggagaagagagtaaaaagaggccgcttactggatttaaaattggtgagatgttccttgggctggttggtctgaggaccagaggtcgtaggtggatctttctcacagaccaaagagcaggaggacaggggattgatctcctaaggaagatcccctgattcgagtcacagcaccaaatttcacttgcgtccatgtgaagagaccaccaaacaggctttgtgtgagcaacaaggctgtttatttcacctgggtgcaggcaggctgagtccaaaaagagagtcagcaaagggagataggggtgaggccgttttataagatttgggtaggtaaaggaaaattacagtcaaaggggggttgttctctggcgggcaggagtgggggtcacagggtgctcagtaggggagcttttgagccaggatgagccaggagaaggaatttcacaagataatgtcatcagttaaggcaggaacaggccattttcacttcttttgtagtggaatgtcatgagttaaggcaggaaccggccatctggatgtgtacatgcaggtcacaggaaatgatggcttagcttgggctcagaggcctgacaaaaatgttgttaattgctctggttatagacagaatagtagcaggaataaataatcagaaacatttatggattatatctttgttgatattttaaacctatcagttacctttctagcctaatgagaatgccttgataaagccacattcttggaaattttggttttcataaatgtgcttgggttttataagtcctgctttgcctaccacttgaccaaattccctacagacttttttatataaacacctatggttaagacaaaatgtgttctttcaacaatgtacagcttctgagagtaatgtctaggctggagtatattcatatatattatttatgctttcatttaacaaacacatgctgagatcctactttttgccggacttagtactgattgctctctcctgagcatccttcttaagtcaaagagaatattcattgttagggaaggaaaaaaagatagagggaaaaaaaatagatggcaagaacatggcaggaacccagtcctgaacacccaggggttttcagaataagggagaggttaacaatctacatagagcaactgggattaaaaatgggaagctggcttcatggggggaggaatagcattaggagatatacctaatgtaaatgacaagttaatgggtgcagcacaccaacatagcacatgtatacatatgtaacaaacctgcacgttgtgcacatgtaccttagaacttaaagtataataaaaatatattaaaaaaaaaagaaatgggaagctggctgccaagactgcaggaagactgtgtcagattcagagcatgaccatcagcaaggtaaatccctactgcccacagtcataattggcaccagactctaggaaggaattatatatttacgtggtgcctaatggggatgtgaggatctcagagggagaaaactaggtaggcacaaataatacccgcacaggccttatttacacctattttatgcaaagttctaatagaaatcattaactggtttcctagcccttgcaagatccaacacaaattagtagaatgttctagaaggaatagaagtaaaaatatcaatcacagtaagaacaggcagctagatgcatattggcaagagggcagataaatagaaagatgtgagaagtcaaaaatcctattgcgatctcattttgcagggaaccaaagatcccaaatagctctctctggaggcaccagtgtatatattattaaagactcagcgagaaaagacaattcactttaagacagcaaataaacaaataaacaatgtggagctgccattcccaatccatttatctggaatagttcagcctcatttggcaatctgtattttttctgaagccccacggggtcattaaaaactccataggtcccaaatgtatttgcataatgatagatgccatccccctgcctgacagtaaagaagcagcaatttaaaaagtatgatgccagccaggcacagtggctctcgcctgtaatcccagcactttgggaggccgaggtgggcagatcacctgaggtcaggagtttgagaccatcctgaccaacatggtgaaactctgtctctacaaaaaatacagaattagccaggcgtggtggcacatgccagtaatcccagctactcgggagactgaggcaggagaattacttgaacccaggaggcagagtttgcaatgggctgagatcatgccattgcacttcagcctgggcaacaagaatgaaactccatctcaaaaaaaaaaaattcatggtattattcttttgaggaagcatactagaaatcaagaatcaggccaagtgctgaggctcatgcctgtaatcctaatgctttggaaggctgagatgggagggctacttgaggccaggagttcaagatcagcctgggcaggacagcaagactccagtctccaaaaaaatatttttaattaaaaaaggaccagtcttattaaagtaaactgcagtcctgttactgatcttagtatcaaagcaatgttagagcccacgtgggattcacacctcctagagttcacagcacaagtttgctgtaacagtagataaggtcttggttgccctgagctcatttcttttttttttttagacggagtcttgctctttcgcccaggctgaagtgcagtggtgcgatctcggctcactgcaagctccgcctcccgggttcatgccattgtcctgcctcagcctcctgagtagctggaactacaggcaccacgcccggctaattttttgtatttttagtagagacggggattcaccatggtctcaatctcctgacctcgtgatccgcctaactcggcctcccaaagtgctgggattacaggcgtgagcctccgtgcccggccctgccctgagctcatttctaaatccatcttcctccaaggtggtggcaagcatgcttctttatcccggagagatggccctttcatcaaagtctcattcagacccttctccttttggaatgcttttcttgggaggttggctgggatgcctactactcttgaggatctgcctctgatagagcctagatcttagaatcaggagagtttcttgcaggcccatcagttactgtgaaagatacctgagctagttggctcacaatccacatccatcaaaccgccccctgcagagaagtcacccggctgtcgcctgcttggcttgccctgcctctcgccattctcatttcattagcaatgcgaatgttcacacccttcaatgtgcatatgatgggtgttaatgagcataacacatctgtgaagcgtgtgtgatttttttgcctaataaataggcagtaaacaagaggaagggaagagctactatctgggggcatctgagaaaacaaaaagcaagcaaggtatgagtcagattgattgttcagtgaatcccaaagggccaaaaacttcctaaactggttttggtgtttctcactaggtgtttggacagcttggaacctggatagtcccacctacccaaaagcattcaaattaggcatgcttttaacaaagcaggtggcatggcatgtaaattgtaggaacactgttaacctttgcaaatgagtttcgtggtccgaatggataattacatatttccctccattaggagctacaaactcatcaagattctacaaccaaccggctcttgagtttcaatctccatgtgacaaggggatttattatgagagggcagagagaaaagaggaacaccgctctctttctctgcaatggaatgatggtcagaaaagaacagatcaaaggaataaacctgctctcctattaactcagcttaccaattctggcctacattttcaaagttatcagtaatcaaaacattgggaaaggaattacaacctcttctcctgaaagtttaacaacttccccatgaagcactgcttttgattgcattacaagctattcctgaagaatttatgacctaagatactctttgtcaatgtaggccatttgtccatgagtggagtgactgataaatcagctattaacatagataagaaagcatatcgattgagtcaactttgtgtttaataatatgctagacagtaatgatgcctggaaaatacactctgtaattaagtacttttccctttatatttcatgaagactcttgtatattttattctggcaaaatagattgtgactaacatctcatagaaaagatcatcatattgtgatcctatatctttatcataaaagtgaatttgagggaaatttttataatttttcaatataaaaattattaagatatcaaaactctttgttttttcactactccaaggtttatttcatcatcttaaaaaccttgtgaatacaatcagtctgctaggtcaggggtcaccaacctagggccatggacacctaccgtggcctgttaggaaccaggccacacagcaggaggtgaatggcagacacgcaattgaagcttcatatgtgtttacaactgctccccatggctcgcattaccacctgagctccaccttctgtcagctcggcagcaacactagattctcataggagcacaaacccgattgtgtactgtgcatgcgagggatctaggttgcacactccttatgagaatctaatgcttgatgatctgtcagtatctcccatcacccctgagatgggaccatctagttgcaggataacaagctcagggctccccttgattctgcattatagtaagttgtatagttatttcattatatattacaatgtaataataataatagaaataaagtgcataataaatgcaatgtgcttgaatcatcccaaaaccatcccctactcccctagtccacggaaaagctgtcttctgcaagactggtccctggtgccaaaaagattgcagaccactctgctaggtagaactgcattcttgtgattatgtattttaatgagcgcatttccttttcatatggagaagggaaccacattgccttaattccccaacttctgccccaaagctttctaggccaatatggctgcattcgagttgctgatggctgtgctaccctcccagggctgatgtacagtttcctgcctgggccgtgtcaccaatcactagggtttaggaggctatagtcagatcttgcagaatatgtcagtctcattctctgtagaattttttgtttgcctgtttttttcttctctttggcactggactatgggcagtggcagttagtggtagatccagggtggagagctgagacctaacaaagaatttttttttctttttttttttttttttttttttttgagatggggtctccataggtcacccaggttggagtgcagtggctcaatctccactcatggcaccctccgcctcctgggttcaagtgattctcatgcctcagccacccaagtagctgggattacaagcatgcaccaccatacccggctaatttttgtatttttagtagagatggggtttcatcatgttggccaggctggtctcaaactcctgacctcaggtgatccgcccgcctccgccttccaaagtgctgggattacaggcgtgagccaccacacccagccaacaaagaatttttaggttcccactattccaccccacctgtgctagaccctgtggtgacaacaaaggtgaaacagacatgctgactgtcattaaaacactgacaatctaaactaagaaagatgaaaaaaattaattgaatacccagtggaaagtaagaaggaatagttttaacctccttaaaatgcttttgattgcattataaactattcctgaagacttaatgatccaagatactacttgtcaatgtaggctattcgtcaatgagtggagagactggtaaattggcagttcatgtgatacatacgctttcagagtaaagagaggtttcttctaataatgagaggagcgcctggccagagagacccaggaaacatatgcaaatactagaaatagccccaagtagcaagtgtggctatagatggtacacgtgaaggagagtagtggggttagaccgtgaagccacgaagaaccaggttaaggaatttagacttttatttggtaggcagtggagagatgttgaatttttttttcaaacagtggagtacagtgaggaaggcaggagactttgcagaaggaaatcaggaattccaaccaatgtgttgagtgtaggattctaaatccagcacaaaaaaaccttcaaagcagcagggaaagggtttggctctgattcagcctcagtggttatactgttgccatcagggagctgggcttgggggtggacagaggctggtggcagagggagggatggagggacagagctgagtttttccaaagcagaagaagacggttttgcaacctagcacaccatctgggtcagatttatcaaacaagattatttgttgacagaccatggttatttcccatttaaaggaagcaatacatatattgtatccaaaatggctccccaaaagcagcgttgagctgatgcaaaagatcagtccattctcccagcaaaagagcagtctcttgacatcccaggtaggagggattcatgtatttcacaaaatgtgtccaatgcaatcatcaggcaaataatattttaatgttttcttgacatgctgagagtaaacttgcttcgatgcactgtctccttctaggcacattactctggagtaaaagaagagaggaaagagacagaggaaagaaaaaatatgtaatcacatatgaactgcaaaagaattctagctgaggttcttagaactataaattcttctttttttttttttttctgagacggattctcgctctgtcacccaggctagagtgtggagtgcaatggcgtgatctcagctcactgcaacctccacctcccaggttcaagagattctcatgcctcagcacccgtccccctcccccaccccaactagctgggattacaggcgcacaccactgcgtctggctaattttttgtatttttagtagaaatggaggtttcaccatgtcggccaggctgctctcgaactcctaacctcaggggatccgcccaccttggcctcccaaagtgctagtattataggcgtgagccaccgcacccagccaagaactgtaaattcttaaaatttgggaggaaccatcaagaaagaaagcctaagccttgtaaccatatgccaacctacattggtctactccctctgccacgctaggcatttcacactctcgtacactctgagggaaactcgagaaacaagtgtaataagaaatattcccgctagagcatggcagccataagctaccaaatttttgttataaaatagaaatatacttctagatgtaaacatgtatatgcttatatctaacctctctaggataacttttgtaagtggattttaatataactaaaactggatgctaaagaaatagccctctcttaaagttgtacttgggcacgtctaggatcaaaaagttaatagttttgtctgtgatcaaggagttaattttttgctgcaatatgtttacatctaacattcttttgagctatccacaatctggttatatatcagtttatccaaccttatttctcctttcctacttcaaagacctccattcaagccgttctccaagctcttgcctaaataagtagttttgttttgttttgttttgttgttttttggggttttttttttttttcaaattttttcctcacttctaagtttcattcagggactacctttccccacttcccctcatcattctctttttctaaaatctatccatccttcaaagcccaggttgaaatttgtcctcttcctgaaatcgccccaaaaatgtgccaaatcattcagatctctgccatctctgagtcttataaatcaaattcttagtggcattcatttgactaagaataataaatacatcactattgttataatcaccataatacctggtgctgttgttagatgctttacctatgttacctcttatccagacaatcctgtcctatcacccccattttacgtgagaagaaaccgaggttcataaaggttaaataactagtccaagttcacatagctagcaagtgacagtcataatagtggttcagacccagaaccgactggcttaaaaatccatggtccttcttctgtgccatatggcttcccaattatggatttcttttttttttttttttttttttttttttcagattgtgatttaggtttattcttttttttttatacttaaagttttaggatttcttacattactttttaacaaacgtattttgtgcatgattctaagaggtagtacactttttttttttaattgtttgcctcattttcccaccatgcctacttttcactttgctgaacccgtatagagtgtctggttaatgttagagaaattgaattgaattcctgacatttgggcccttttcttgagttcctcttctttgtccatagatgaatcatcccattacatctaactccgttggacagcttgcttcttcctcaattgtatgtgaatagttttcaatccactttactaaaatctaatagtcaccatctgtgtctgctatataaatgtgaactcttgaaaacactaacatttgtgggtcagaaattagaggacagtaaaataaaccactggaactgtgaagagggaggaggcgtgaagaggcactcccctctctgctgtctgtgggtcaacctttccggcctgcctgtttctcaaactgagtgagacttgtctctgaagccccattttttttttttttttttttttgagacggagtttcactcttgcccaggctggagtgcagtggtacaatctcggctcactgcaacctccacctcctgggttcaagtgattctcctgcctcagcctcccgagtagctgggattataggtgcacaccaccacactccactaattttttgtatttttagtaaagacggggttttgccatgttggccaggctggtctcgaactcctgacctcaggtgatccacccacttcggccccccaaagtgctaggattacagacatgagccaccacacctggcctctgaaaccccatttaattttccaaatgaaggtgatgtgtcccaggcatcatacataggcaagaacccacaaagtggcagaggagcaggagcaaaggggcctgggcaccccctggaaagtcatcatacagctttactcaactgtcaccttctcctggccttccttgaccactgtttttaattgcaaatcccactgcatgatgccctatccctcttccctgacttattcttctccataactcacattttcaaagcattctatgcatttcaccaaattgtttgtggcccttctcctcccaccagaatgtaatttcaagagagtagggatctgaggtcgggcgcagcggctcatgcctgtaatctcaacactttaggaggccaaggcggttgggtcatttgaggtcaggagttcgagaccagcctggccaacatggcaaaaccccatctctattaaaaatacaaaaattagctgggcatggtggcgggtgcctgtaatcccagctacccaggaggctgaggcaggagaatcacttgaacctgggatgtggttgcaatgagccaagatcgtgccactgcactccagcttgggtgacagagtaagactccatctcaaaaaaaaaaaaagagtagggatttgggtctgttttgtactatgctagatacccagcacccataacagtgtcagacacataggacatgtattgaatgaatgaactgatttataagcagaatatttaagactgttgagaagccatacccattctaatcaggcagagcagaaggttaaaaatccacaacgcttacttttgagttgtgttgaaaccattgaaaatatctgtgtcaaactgattaattacctcggtttacagaatcagctttttaacatacatagcaaattctatatgctagccaatggcaagccagatctcaagcaaggccattcttgtaaaataaatggacagatttttgtcttttctattgtataagattctaaagccttgaaagcagtaatatagaatctccttaaatacaaatttaagcatcttttcacgtttatggcctcagtgcctgtttataaaagtagttttgtaagaaaaacagtgtaagaaaaacatctaagagtagatgataaagacctatccttgtgtgaccttcagatggaaaagcatagatttaatctgagattccagaacccacctagtttttaacttcatttgtttgtctaacttaagaacgtgagtcacaactaacaaagaccatctggtgctgttcttccctcctaggagaatgtctccagaagtaaataaaggagaatcttgtccatgcaagctactctcagttccaatagaaaaccatttcagcatctaattcagagagttgcacaggagatggccaaaggcactatctgccatatgtctgcgtctccagcccagccatgaccccaaaccaatagatttatttttaggtagtatcatgtaaacatagaactttttaaactagcaagttggggaaacttcatgattagtcaatctgctagcacatagcagaagctggtgggtgccttcccagcagccagctcctctttctcctacctcatagcaccccagttattttcaggcatctaccctcctccacacagccaagaacttcagggaggctatttccttccccaggcccaaggagcacagcgtggaaggggaaagagagaggttcatggacggctctaccatgatgccatgtgtctgctagtaaacttctactgactgactgagcatgccccaggtgaaataccctccagtacctccttctgtttttggacttacctgttgtctttctccaacctggagactctcaacccttactgcaaattactgccacgtggggagcttttaaaaacctgcagacacccaagtgcacccaagagagcctgtttcaatggacctatgcaaacaggtttttttttttcattaagttctctgggtgattgtaatgtacagccaacaatgagaaatgttatactaattccattactttgaccctgtctttgagatgctttgggagagcttggcgctcaggaccatctttggggatcttttccatcatccagagggaagctggatcttagagtctggcctctcggttatgggtcctgatgttttttcattgtgtatggtttccatgatctgtcctctgcaataaaacagacattgctttctatatgtaattctactcatccttttggggtctctcttcgttaccatctgcccttccatcttgccatctcactcctcactcccatgattctggaccaaactaaccagcattcctaatctagtctcttcttgaaaggatttgaaacggggaagcagctcttcaggaaagaaaataaatagagcaaatgggccgggcatggtggctcacgcctgtaatcccagcactttcggaggccaaggcgggcggatcatgaggtcaggagatcgagaccatcttggccaacacggtgaaaccccgtctctactaaaaatacaaaaattagccgggcatggtggtgggcacctgtagtcccagctactcgggaggctgaggcaggagaatggcgtgaatcagggagatggagcttgcagtgagccgagatcgtgccactgctctccagcctgagcgacagagcgagaccccgtctcaaaaaaaaaaaaaaaatagagcaaatggaatgaagaacctctgtagggctgtgttgatttaaggcagatgtgggccacagttttggtgttcacacccaggtaaacaaggcagcttccttctgctcatacacgtgctcccctctggaagagccaggtttgcaacgggctcgcagtggctttctcatcctggcagcatccagtttcttgtggacgttgctgcatcccaaccacctagcagattacacgaaggagtgaaatacctaccactgaaaagaatgaacccacagagaagggtggcctcactgctcccaggggctgctgcagtggcccgtgggcagctagactggcctgcaggggactgaccctggtggacgcctgagtctatgtgccaccatctaccctgtgataagtgtagctccgacatgatgtacctttgcctgttgatttccaaggacaattattttagcatttcaaaattcagctcaagtgctggacgacttctccctgagttttgctgtttgccagcagcctcctcttggcatgctccctttccaacatcctcactgaacttgttactattaccaccatgtacttagagaatgcaactatcaagtgctattgaacacaccttgttttgtaaaaaccctgttgtaaattgcctccttattcctctgttccatggccagtcaaatcacaccctcatgtaaatagtgacaaagacatattacccaacttcaaattccagacacctgagtcacaggtgttgttaccactaccccaaaccacaaagtgggattatgtgtctcctagaaccgtattataatagacactcactgtcttgcaaattgctcctaacttgggtagaatattttgtatttattacttttgaaaatctatgggtttctattgcctggaaactcaaggattacagcagaattagagaatctggtctctggatcacagatccccccactgccctgcaccgcccccacccctttctcatggagacctaatcatctccacactggatccactcacatggatcttctgaccttgatccagagtttacaggtaaaatgtccacctgaggacactggtttctgttttgacaaaggtagttagggccttggaaagttgtgaaggaatggcatatctcccagaaccctgacttccatcagcatcttattccaggagctctgaggaaacctctaaggcacaagtgtggaaataaagaccacccagatgagaacacgcagaggctatttattcagagcttgctgtagcaagagagtcagccatcgtcacttgtgcctggcagagactctgaggcaagcggggagtgggaaagctttcaggtggagagaggggaaggctggggtgtgccggggctggagcttgttggcccgggaaagctggaggagggctgcctgacacaggaggcatcctgtgtgattggtgaggggattatatttggctccctctggttggcctaaagttggcagcagggacaaaattagggaatctggtatcaattgatcatttggggccagcttcctggaatgtctgctgcagattgtgggtcagcgtgctgttgtcgcatatggccaagctgttgtctgtctgtagattccatctcttggtgttcaataggccttggggccatgaacttgtagggagggttttctcaagacctgggttatggaaccagcattgaggttcacagaactcacatccaccctcaaatcagggctgggtcacagacagtttattcaagtgctccaggcacctgtcccagggtcattctccctagaaagacccaaacaagctgggcgcggtggctcacacctgtaatcccagcactgtgggaggccgaggcgggtggatcacaagttcaggagtttgagaccagcctgaccaacatggtgaaatggtgaaaccccatctctactaaaaatacaaaaattagccgggcatggtggcgcacacctgtaatcccagctactcaggaggttgaggcaggagaattgcttgaatctgggaggcggagcttgcagtgagccgagattgtgccactgtactccagcctaagcgacagagcaagactctgtctggaaaaaaaaaaaaaaaaaaaaaaaaggcccaaaccatcccagggaattcagttcaagccacttctccctcactgtgttctccatgctgctgcctggggctgctggccccctccctgtctgcaacggactctgacccctggaccaggacacccagcaggctccccaggaccacagattctgtctgaccttggggattctctggtgtttctgaaaattgctgaaagcttccagtggccattgctatgttatttgctagtcggctaaaaagttaaactccatttttatatggtctagattagaagagaggaagaaacactccagaggcatcagaggctcaagaaaatgcctagaatgaagttcagaccatcaagaagtccccggtggctcaggcacattcactgtttgttcattcctctgacagtcacggacagccccctgtggacaaggcatggtggcgggctggggacagtcttctactaggaggatggggaagacctgagaacagtgcaggaacagaaggaacaaatgtgcgggctgtgggtcacagtataataggaacacaggacagaggctgaagatggccccaggatttgagttacgaggccagtgctgtgctattagcaaccaaggggacctggaaaggattggaaggggaaggtcttgaggagaggctcctggtaggttttttctgatcaatagtcccaagggtcaaaaatatcaacagtgacagtcagtgctgggatcattctccctcacagatctgaacccttgagtatgttgattttaatgacagggacgttctttatccagccttatgcctgaccaactctgattcatccttcaagtgaggagatatctcttcaccctcgaagctttccctgatgcacaccccccgggccagggcctgccccagagctccccactgccaccatcacttccccagtgcaggcccttacccccgtctggcctgttgggcttattgactgaggcccccaccctccccagccagcagcatgcctgccccacaaagctatccagcaaatacagattgagacacaaatggatgaaagacatggaaggaatgtatggatggaatggagggatggagtggacacatggaatggatggatagatggagtggatggatggagtggatgggtagaatggatggatggagtggatggatggagtggacggatggagtggacagatggaatgggtggatggagtggatggatggaatggatggatggaatggatggatggaatggatcgatggagtggacggatggatgtaatggatcaatggagtggatggatggagcagacagatggagcagatggatagagtgaacagatggaatggatggatggagtggacagatggaatggatggatagatggagtggacggatagagtggagggatggagtggacagatggatggagtggacggatggagcagacgggtggagcagagggatggagtggatggatgaagtggacggatggagtggatggatggatggagtggatggatggagtggatggatggaatggatagatggagtgcacggatggatagagtggatggatggagtggatggatggagtggacggatgaagtggacggatggaatggacacatggagtggacggacggagtggacggatggaatggatggatggatggatggagtagatggagtggatggagtggacggatggagtgggtgaagtggatggagggaatggatggatggatggatggatggagtggacggatggaatggacagatggagttgatggatggaatggatggatggatggatggagtggagtggacagatggaatggacggatagaatggatggatggaatggatggacggatggagtggctggatggaatggatggatggaatggacggatggagtggatggatggaatggacggatggaattggatggagtggatggatagagtggatggatagagtagatggatggaatgaacgcatggaatgaatggatggaatggacagatggatggagtggatggatggaatggacggatgggatggatggagtggatggatggatagatggagtggacggatggaatggacagatggagtcaatggatgggatgggtggatggatggatggagtggacagatggaatggacggatggaatggatggatggaatggatggacggatggagtggatggatggaatggatggatggagtggatggatggaacagatggatggaatggatggatggatggagtggacggatggagtggatggatggagtggatggatggagtggacgcatggaatggacggatggaatggacggatggaatggatggatggagtggagggatggagtggatggagtggacggatggagtggatggatggaatggatggatgggatggatggagtggacgtatggaatggatggatggatggatggatagatggagtggacggatggaatggacagatggagttgatggatggatggatggatggaatggatggacggatggagtggatggatggaatggacggatggagtggatggatggaatggatggatggaatggatggatggaatggacggatggagtcgatggatggagtggatggatggaatggacggatggagtggatggatggagtggatggatggaatggacggatggagtggatggatggagtggacggatggattggatggatggagtggatggatggaacggacggatggattggatggatggaatggacagatggagtggatggatagaatggcctcctctttgtctaaaacccccagtagctacgaattcccccaacaactactacacactgccctgcacatgatcacgttcggtaagttgtgtgagagggcaggagggagaaaatggagctgcctgcctgcctcacgagcacctttcaccattttgatcacatttccagatgcagcaccaccctctgctctcacttctttcctcccagaccagggaagcattggatggtggttcatgaggtgctggaggagctaaagaaattgctgtcatcgttttgtcaaatccagggcctttatgttttaaaatagatatacaaagagatcacattttacctggtaaaatcatgacaaactgagcggacaaaaaaaaaaaaaaaacctataaacatttggcacaacagagcaaaaatcataattcctataattatttttaaactgtgaaactattgtagagcattgaatagatgtatattaaagccatgtatgctttatttgcttatgacatgaaattctggtttctgtgtgttccaccttcctattttattcttaggataataggatatgatgtgatgctttactcatagttagagggagaattgactgtgaatgagcagttcagagagaaaggatcttgggcttggcaagggcaggggcctccagcgttttgagaaaaatgaattgagcctcagcttattttataaaaatcttgacccagagcgtggcccttctgaactcccaccatgtttatgcatggtaatatattaaaaattggacttagctagtagccaaatacagtgctgtgttctggatactaaaacaaactaattctccctgctaagtaagaaaaatttcacacattatcgtcagtcagacatggaaagaggttctccaggggaagagagagaagcaacatcattcatgtgatttaaaattacaccaggccatccatttatctgcctctcaggctgtttgtccttttttgaacgatgcttcagggctccacgctggaaacggggagggtggatgtagaacagcttgtcaatgtaatcattttactataaatctgcaaaaaaagaaacagagcctaaaccaagtataaaataggatcacagaacctcctatgagcaactttgtaagattatcctttctagtgtgagtactaccacaataaacatgatgacatatcctttatcactatgttgcccaaagattttttttcagatttcagtggactcctcccctgccactcttaacagccctgctcctccaaacatagctgtatggagagagatgtccatcacagggatgtttatacaaaaacatcaaaacactcattttttcaggctggaaacggtggctcacccccgtaatcccaacactttgggaggacaaggtaggtggatcacctgaggtcaggagttcgagaccagcctggccgacatggcaaaaccccgtctctactaaaaatacaaaaattagccaggcatggtggcacacgcctgtaatcccagctactcgggaggctgaggtgggagaatcacttgaacctgggaggcagaggttgcggtgagccgagattgcgcgactgtgctccatcctgggtgacagatcagattccatctcaggaaaggaaaaaaaaaacactcattttttaggtgaagttaattgactgggaggactttatggaacattttggttcttttcctactgctgaaatttgaatagaaaggcatgaggtaacctcatgccatcactacgaaaggctaccagaaatgatagaaaacctcacacagtatcagctacattggtggagtccacctgaatcccagaaattcagttcaacaatgtcactgagttcaccagactactgggaaagggattcatgtagagacagttgtaaaaatattgaccctaacagagaaagattcactgcagtcagaagagatgccacgaagtcaggtctcaactcctggagaggctctttctgtgctgtgcaaaaatgtatgtttatccgacttcccaggccttgaggtacagcaaggaatgccagtgttggatgttctacaagtgaggacactggagcctcaagaaataatctgacttgcacaactcctgtcactgattagtggctaaggacatcctgatttctgctccagaactttccccatgacatcagtcttcccatccttgaagagttttcagttattcttagcgtgacaagtgattgctagagtttgtgtaattttcatcataatgggactaatgacccacaacagcagttctagtgacttccagaagatgttgtacatccccatcctaatgaatggcagcagcatgacttacgttcttttatcagagagtctagtttgatctgagttgtgtctgacctggaattcaggcatgtctggggctaggaaggttttgggttcgaggaggctgttttcatgagggatcccagggtctcttgggaaggaattcactcaagggaggacagaggcaagagaagcacagttcactctcggggctgaaggcagcatgggttttaggtgcagcctggtgacagtcaatcgggtggcctaccatgtagtgattaagactttggaaaagcaggctataagcaaaaatctaaatttgctacacaataacttggcaagacaatggagcagtggctggcaccatggaccttggtaagaaacactagaaaagttaggaaaaggggtttttccaggtcagagagagccagtgcatgctggtggacccacagttctgtagctatgagaaatagccccatctggttgtgcaggaaccacaggctgcactagctgctttagttgtgaccgcagaaagcaccctgccccagcatggagcaccagggcctgcacacctttgccaggccccagaagcactgccactgccatgatacccaagaagagagagattagcaagtgctttgtaccagaggggagggctgcccatgcaaaggcctgcctgggggaactccagcaatcattgggggagactttgggagagtggagagaaggggcctcctgaaaagacacagccaggggaaacctactttcatgatatcaagactctaattttagagggcagtgtttgcagatcctaccaatgactctttgtccttgagtctgtgtttgaggtggaaccactcaaagacggggaagatgaggcacctggagccaggcgcctggtctttgtgtctgcacttagccaaattccctctcagctgtattgtgtctggaggaaatagaagcatgactaagctgatttgtattctgccaaccaagggaaaatataattaacacggcagcaagactcagcaaaccccatgggaaagtccaagaaggaaagagctcccgtggctcaagatgatgtcagaggcaaagagaggccaacccactctaatcccacagcaggtctcctctctaatacctcaactcataaagggaaaagacaatgaaatccaggcctgccatgcctttgaaaagaacacacagcctctaggagtgattgcagggattgagcagactgtgatgggggttttctcatgatgggagtctcctgctgttgctgagtgctgccaatcactgcccacacctccagcagggaggtgacttcctcaggctctgctactccacatcaactgattaacgcagctgtgatagcacacctagcagagacaagagactcccagacactaggcaggagtgagaccaactgctgtatcagatatacacctagcttataattacgtgtcaagagaaggaagattaggcagacatcagtaaccgcaagaactgaaatgtgatggctggtatccatcttcagcctgctccccagctaatcatcccctaaaagaaatgcgggagaaagctgcctcctaatacatttcattggcccttcatctccgtctgctgactcacatttgaatttagagacaatttgctaaactttctagatttttatttacttaacattgccttagcctttttgatatattcaactatagtattctccaggtttaaatattgtacgttttttttcacaactttaacaaattagtgctcagttctcctggcttgaaattcccatatctttcatgaagctgttgaaactaaaaggcttaggaggaaggtcacccacctccctcattctccttcccttcttgcccagaggaatttatgtctgtcttcctgccccaatatctacatatccagccatgactacattgtttggtttaagtaactgcctctcattacagaactagattcatttattcattcattctacaaaaacttgaagaacatttatgctggatttgaatccagtgtcagaattgtctttgattggttctatcttatttcatagatttggggtttgaatttaatagctaagcatataaatataattttatgcaagatagcaccttaattctagtccttatttaatacaaatagtgatataatgaaatgatatagttttatctagtttcatctagagaaatatggaaggaaaaatacaaatagttaaaaaaaggaggaaggctgaaaatatatagcagttgatatgcttctcagagtcatcttttactaatcagtagcagtggtgatggtcttttaaaaaaaaaaagtttcggttgcttttaaaaagagatttccagtgggaagcctgtgagtactgactggctcctgtctaacctacacttcctgtttggttgatgaaaaagaaaaaaaaaaaagccaaaactaaaaggtacattccagaacaagtagtcattttaacaactggcggagccaagaaaatgcgatctagtttccctctgtcccccagtctagagccattattaaataatttaatgccatagaacttatatcaaaaatagacacattccttaggaaacatttgaaacttactggttttgaccttaaaatgtaatcattcatgaagagatcaatctttcatatgttttcaaatatgaaacactcaagtccattgtcagaatcccaatagtgtggaaagaaacctaccagggcaggcttatctctgctcattctttgctaaaatatccattgcatttgctaactgtgaaacgatgggtaggttacttcacttctctgagcattgaagatgccctgtctacaaaggataacagtctctctcccaggggtagctgtaattgtgaaattaggcaacatatataggaaggtgcctaatggagtggcaatcatttattcattcattcccgaaatatttatcgattggccacaatgcccaggcacagagcaaggtgctagtgatatcaacacgggggacacttcacatttccccccattcctccctaacggtgcagcagacaccccactaaagctgaggaggcccctgctgctccccctccctctctgctccctgagtctgtgagaggcatcgctccagcctcccaagaaagccctccccctgcacatccaagcagctccctcttatcctgatgccctgacccgcctgcccacaaggagcctcctccctgagccgggaggactttccttctctcctatgacaagccctggccctaggcagctgaaaacaatcacccaggaagctccttcaccgtcagattccctgacagccctggatctagcgagaatcaggtgatttcgatgtgaaacgaggtttgggaaccactgctttcagtcacattctttttgtttgatcttctcagaatcagcaggcatttccctctgctactttgtccaagatccaacccttctcatctgcgtcttgccagtctctccactttagagctttgttaccagctacttctaacctcttgcacagaaatctctactcaccactgtggagagtgaaaaaggaatgggtttttatgtatttctagccagctcttggccctgcgccatgcagagtatatgctgtacattggactttcgggacacttctctgttaaattctaagccttatgtctgtggtgtctccacagtgagtaagctcttaatcacattccctattgtaccttcttagatgaaagagcaatgggtcagggggactttttaaatgtccttaaacttgattagtttaatctttattatggctacagaatgtttcttaaatttacatacgataaaatccactattttatattaagtagagttatgagttttgacaaacaaatatattcaggtagccaccaccataatcaacacacaaagcaatccattacccccagatttcccttacatcctttgttgtccccctcatcctgtacttccagcccctgagagccacttatctgatttctgtcccgacagtttgccttttccacaatgtcatgttatataaatggagacatacaatatgctgatgtgagcatttagaaagatcatgtatttaaacaattattagagtaagggctggctatggtgacttaattttttggtttctgacacctataatctgatttgaagtgtgtcattctgtgcatcatgatcctttttgcagaacctgtgtctattagaaaatccagatgaagcaggctcttcctgttgtccttcatttggaaaagacagaagaacagagcgctttacgaaagtcaagttacagcttcctaattttctctcccatggacaaactcttccctccccccaccccgacctagcctcttacccactatcctttgcaaattcctatctcttatattgcccagtaattggggcgtgggggggtgaggggggggtgagttactgctgatgaaccaggaggcagagcaaggtttattttgctaaaggcttcagctgctactgcctggacctcaataagcattttctgctctttcctatcactactgtcttccctttctttgagaagcaacataaagataaaaagaaaaatacttgattttgtagcatgccagaatattaagatgctcctgaaaagtgtgggatttaaggcttctcaaaaaagagcagaggagggagtgagagaagaagacggagaaggaggagaaggggaagagaaaggggaggtggaagaagaaaaaaccaccatcagaaactgagtattacacaggacgtaacctgtgctctgagagtgaaggaggccacacagcagtagaaccccgacaggaaaatcagaaaacattatattttttcccagatcccagagtatcagatgttccattcagaaataatccctattgacccagtctctgtgtctctctctctgccaatagcatcaagcacagtaaccctttccatgctaatcccgttattaatgccatccacaacaagcgtagtgtaagtaagacacgaagtgtaaaaaaactttcttccccgcagtccgggctctcagagccctccttgtaggtcaacagtatcaaaggtgcttaacgcagatacaccaggaggctcaaagcccaaacatcgaaaaaaaaaaaaagacccactcttgtgctgtgtgtattgcccacgggtgggaggatgcaagtacaattacgttttttaaaactccagtccagatattggcttttccttggatacttttgtgtggctctcccagtacagtcagatccgccgccgcagcctagcgctccaccccgggttttgcgtcctcccctcacctgcctttcagtggtgcggggtttgatcccgagagcggtggactcaaagctgcccgccgggactcgggctgccggccgacaaaggacggtcctcgggggttctgaagtctgacccggccagtgggaaagccacctgcatcacaaagcgaggggcacacctgaaccggggctggcgggaagaggcaagtattgcgcgcgggctggctcccacatggagctgcctcccggtgcaagtgttgcaagggtgcgctgctccagcccggggagcgcgggaggcggcggagagagcgtccgggtgatgagcggggcactgtaactggattttaacacctctgcaagcagcgcttttggtcaaaaaatttccgattcttgatcttctctctgcaaggtcgggggttctttggggagtaaatcacagcgtttgggtttgcattcgaagcactaccaagtctactccacagggtcactgcacggggagcaagtaaaggaaaacgaggagaatctgagagtgctccttcgtgcagtgtgtgtgtgtgtgtgtgtgtgtgtgtgtgtgtgtaggcaaagctgagatttacatggtgtgaactgttaaatgttaacagttaaatcccacacttttcaggagcatcttaatattctggcatgctataaaatttttgagacttgtttaaagaaggggacttcctttttaatttagaacaaattagtagttgttataacattatagatactaatcagtaacaatactagtaggtaatgctttctgtaagtagacacaccccaaaagtatctgaaaagtatcaccaaaacggagcgtgctttcacactcctgcaaaacaaattagcccttaaacagaataattaacatcccgagggaagataaagcatataggttccttgaatcattacgttacatttaaagtcggtcctgttcagtttgcctttgtccctaaggagtaaaaatagcatcaaattgcttgtttggttttccccttttgaaactcagcatagtgtttggttatccatgaaggtggctttaatatttcaccctcatatttggcagacagttctggacttgctcctctccccgtagggactgagtcccactggcagtgtgtggagaatagaattgattctcgctttttctttgcataatacctaatcatcaccattagcacttcagacgttcacagctttctgaataggtgtcatttcttccacataccctattgatttgcatcattaacaattgaaaggaagctcttcttttgattaagaagccaaacaattaggaaagcgtggattctttcatagtatttattgagaggcgtctccacctgatctaggctgtgtttaatgggatgagagagactaagagagaacagaaagtgtaattaccgcctctccaggcccgtctttactttttccagaaacagagaattatgaaattatttgtaatgttacaaggacccttggagctcttctagtgcaagtcaagtttatttcacaaacgggaggtctagacagcctttgtttcttctgaacgggtctgcaaggccaagatctggattctgacccacagcgactgctgatccaggaattccatgcacatatgctatgcacttagcgctgattgtgaagaaacaccaaggtggcccgtcaagacctgaactaccacaggtctaacttgggaaagcctcattcctcacgttctttccgcttctactgtaatggtactgtgcctcttgccagcccacacttattcatttgaaatgtgcactttggaagttcactgcatttaatcgattcagaggatttcttttttttttaattttttttttaatcagtagctgagctatactacctagttctaatccgtaatagtgtgttaaaagactgttttctgtgtagttgctggctgttatttaaatcccaaggctgctgaaagttggtaatagaaccaataatagcaaccattactcaaaagtctattgcttactattaactataataattaactattaagtattgatattgtccccatcaatttttaggcgttacctaacattatccccattttacagatcagaaaacggaggcttcagaaaggtgaagttactagcccaatgtcactcaccttctaaggtggggagcagaagccaggttggtctgacccctaagctcatggtctttctatactaccttagtagtatagaaatgttctaactttcacattcccggatgtctgagctcaagacaaattttaaataaattagcgtggctttgatgttctctcactagtgaaagggtctataacactttaggcaaaatgcattgaaattatgttaaaccttcatacactgccaataagcaatgacttcccagaaaccatactccacatttgacccagtctctaatttagtgagaaggtgagatgcatggaaagaaggcaaaggagagtgactagtgacccccagaaaagggaatctcttcccgaggtttgtgttgtgccctgtggagctgagaggagagtagggaattgatggagcagaggcttagccaacgcatctgaaagagaagagtgttttatgtctttaatttcttcttgtcagaatcaaccaagcccagagctatttacgtgttgagaagggtctcccatggagaggccttcccagtggcccttctactctctgctgcggtggtttatcatgtcttcaaaacagactcgccaccaggcttccaacaggataatacaaatgtgaaatttttgtcctcaataaagagtcagaaatgatgaccattctgccactttcatcattttaaaatctgtattcctgaaaactggcctcgaatttatttctgtatagtccaaggtattgatttgaaagtgagaggctagcatgaaagccaacacttctcaactttaaaaaaaaatgccttaatatttagtattttctcattctaatgtatcctgtaagtgttctttctgtacttcttgttaaggcatggctgtgtaaacttcagagggttttgggaacagcctccattgtcatccacttttcattctaaaatcttggtatatctgtgcatacatgcacaaggcctcccatgattgcactgcttttacgaataatcatagtcaaaattcattttttaatactgctagctcaatttttatttcttattcctttgaaattgatcatcatttggacagggactgcattaaagctcaacactgaccttcattgtggccacaggaagaaaagatctgctaaatgaacaaatactgtgatcgatattgtgcaatggcttgagggaaaaaggaggttttaaccacttaaagtaagcccttttagaaacaaaaactatttcagtgaaaatgctaatcctacacctctccaaagtaaatgtgcttagaggacaccagccagagtttctttacaatgggaagttgccttccaacaagaaagggttttcaaagtgcagaagaaaactttatctggaaaaggtgagaagcagagagcctccaggctccagccccacacactctcatcttcaattaatactccacaaagggaaagttccattgtgggccacagcactccctgcttgagaacctgtagggacttaaccgctgggtttatccaatgaagtgtctgaggtccccgctgtttagcttggccctccactctctgttcccaatttcgtaaccactacctcagccagtctccccagcagagcacttttatcttatagccatgaggcatctgtgacatgtcccacaacacatcacaaactctatttgtcctccaatgctcagtgaccttattttcccaggcaaaagtggctcccgtcccggtgcccactaagccttgataccagcccacagtacagtgcttctcagactaggtcgtctcagcatttgtcaatgtattttatttatgtttcgacgtccagtctgttcatcttcagtacaggactgggtcatactcatctttccatcctttcccttgtccaccttcctttcttcgatttgaatattttctgtagttgctccattaatcagtaattaattaattgcagaaatgtatttcccaagatgtagataagtcacacctcagaatgctacaaacatttgtagatgtgactgatcagtaattgtcaggagactttgtcaatctggagaggtgctgaaaaacagagacaagaaaatgtcaactttcaaaaatactcatttaaaaaagtagtttccaagaaaagcgtagactggcaaaaggatgattgacaaaattctggactagattactaaataggtgatatgtgagaatttagaggagaatcgtgtgatttgcataatccaacatgagttccccggaatcaagccatcccatgtgaaccatatatctcttttatatataggttctgaaactggtgaaatggggaccacttgaggttagagattcgtaattcagtgttgcctctgatcagcctggaattgtagtttatatgccagcaactgcatgtagcctgagggctcccatgactgggctacagccaattgatcacaatctaatgatacccctaggagtgccttgggtgagagcgttgtccggggcaaaccttatgaaactttgtcagatggtcttcacacagcatttcttgattttagcagagcctttgactcagtctctcctagcagattttttcacttactccacagatatttatttaggtgtttattcagtgtcaagcattgtattaggtgttcagtgtttgtggctcagaagcaaattctgacttagttgataatatggagagcaaaaccgagtcaaaaattgattgcctgaaattatctttggaactgcaggaagtcaatcgattgatgaattcatgtgtgtccgggtctctggggtacactgtgtgctcccccattcactccagtccctgctcagagtccttctccaatcacctcctctataaaagcaccttgccccatcatttcctattccctcatgctgttttatttttcatctttgcacattttattctctgcaatgatcttattcacacaagcagtcctgtagttgcctgctctctgcccccttgcttggaatgtggtatgaatctagggaggcatttcacagggctgggtcttttgttccttgccgtccattcaatatgtctatcagtgacaattgttgtcattcctgctaatctaatttgcagatgatagaaagtgaggaggcagagctggcatggtaaataaggggatcaaaatgtacatcagcagcatatgtgaaagcactttgataattgaagaattataattaaatgcaagttatcattttttaagtgcgtataaatctaagccaaaaccaataaaatgaaagtatcaaggttaaatataagctcatgcatttaggttcaaaaaatcaattacacaaattcaaaataaaggagacctaagagggcagcacagtccatgccgcgatttagccatgagctgggcgactctagggctgcaacacagtccccgagtggtggagccatggctggaaattcttcgaatgttatcagttaggagggccacatggtgaggtggacattaccaagcccgagtgtggccagtggagggtcactcagaacagcagcaggaattgggacgtttagcctgaaggagaggggacttagggaggtggggacccatctttaactctctgcggggttcacatggaggagacgggcatgtgtgtgctgagtgctaagttagaacctctgggtcctggggggcagactttcattcaaggtacggagaatgatgggagcccagggccagaagcctataacccacagcatctggacgaatactgagcgctgtcactagattctatttttatttgtttgtttgtttgtttgtttattttttgagacagagccttgctctgtcacccaggctggagtacagtgacgcaatctcagctcactgcaacctctgcctcccaggttcaagcaattctcctgcctcagcctcctgagtagctgggactacaggcacccgccaccatgcccgactcattttttgtatttttactattttactctactattttagaagagatggggtttcgctatgttggccaggctggtctcgaacccctgacctcgtgattcgcccatctcggcctcccaaagtgctgggattacaggcgtgagccaccgtgcccggccgtcactagatatttaaagagaaactggacaactgtggggcagaggccagctcttaagagggatcctggctttgggttggatcttcaattgtctttgttctttgtctttccaagtctaacattcttatctgttctaaacttccgtatttttatttgttctgactgatttttttttcttggtgtgacatttgatgtaaatagtacttagcaggcttagcaactcctatatgaaagtgctttgaaatttgctgggctttggaatctctgttgtttttgcccattaagtaattccctcccatccctcttcaatgttcccctttccctatcaaccagccctttctgcaggttggagtttgatagacttggcacttggcacaccccctgagcgccagtgtcaccctctgcgttgtgaatttatagatggagaccccttcatccttttacagtcgtgctctgatcctggggtccctgaggtccagagcagaacctgaactctgagtatcaggcaagcgcatcttacttcaaaaaatgggaagaacaatttaaaaatgcaacttggatatgtttttataagatattcccgctttctgttttctacacttatttagcattttaacattttcagaatacgtgaaaattagatttagtttcttttttaaatgtgaaatataagaaaattatgattacccgtaacacatttgtgattaaaagtacattttttaggaaaaaagtattgtttccagggaacaattttctattaagttggtgcagtaatgattgcgatttttgccattgaaagtaatgcttaggccgggtgcggtggctcatgcctttaatcccagcactttgggaggccaaggcaggcggatcacctgaggtcaggagttcgagaccagcccggccaacatggtgaaaccccatctctactaaaaatacaaaaattagccaggtgtggtggcaggcacctataatcccagctacctgggaggctgaggcaggagaattgcttgaacctgggaggcggaggttgcagttagccaagaccgagccattgcactccagcctgggcaacaagagtgaaactccatctttaaaaaaaaaaaaaaaaaaaaaaaaattaatggttaaaaccacaattacttttgcaccaacctaatacttagaaagatgcaataatactagatggttacctttaacttacaggtttcgggtttcacagaaacaacagcaaacccaatagtgcttcactcagtttccctcccaaagacagcaaagagagaaaattaactacctggccaggcgcagtggctcacgcctgtaatcccagcactttgggaggccgaggctggaggatcacctgaggtcaggagtttgagaccagcctggccaacatggtgaaaccccgtctctactaaaaatacaaaaattagccaggcatggtggtgggtgcctgtaatcccagctacttgggaggctgaggcaggagaatcgcctgaacccgggaagtggagattacagtgagctgagattgcaccactacacttcagcctgggtgacagagtgagactccgtctcaaaaaaaaaaaaaagagaaaacaaaaaaccaactatctaaggcagaatggtaataaactgcccagtaatgctttcagggataattaaatgagtgatgagggcacaattacaaataagctaacccgagttacttggaaagcagatggaagcacccaagaccatacaacaagaatgaaaccccagaacagtaaacacacggtattcctaccatatatgccccccatcggtgtcacctaaaccaacatctctttgaccttttttttactcatgtgaccagttatttgattgtttggctgtcaaagtcacaccaagataataaattaggcctttcagagccaaaattatattatctagggtattacagtgaatatagagttaaataattttagtgtcctgaaaacattacaaaacacatatcagaaataagagccattctatgtagtgaatcgggggagaaatgagagaagctcagagaccaacatagagaaaagcaggagaaagcagaaagcactggaaacaaacatgtctgcttgttggtggtgggcgatggatacaaagatacccagccagaatccccctggaacaagccaggcattaaatctttacagctggagttgcattaaatctttacagctctaagctgcttgctgcaaacatcctgtagttctcgtcaattcaaactcatccccaactttctttttttttctaccttactcagtgcgtctgtgtctgggtgaacttcagaaatctctctcttacgttttcttgcaagactctttggctagttttatctgaaagtttgtttgtttttccagctagtagttcttccccctcttccctaagctcttgaagtctaacactgtttctctggtcagagggatcagacaaagagagctctgctcccggccacccatccgtctcattgattcaagccactgggtctgagtgggccccatcagagggtgtgatgggttccagacaacctggacgtgcttttagaaagcagtcaagagtaaatccataaagccttatctttgtgttggaggggaccacattataagcaaatcgtacattttcttccaatacaaagtaagatagtttcctgcattattagtggatatttttgcaaggacatatttaaaaatatatattgcccaataacccatcattcagtttaattccacatccctgctgggtgccttccagtctaccttgggcaacttaacataaatatggaaaatatagtttgtgtttatggagctcatcgccctatgagagaggccaggccctcacggaggacgaggtgacagcgtgggcacagccagctcttgaagaatatcataggtgatgaatgctctagagatcccaaggccaaagcggctcaggcacacgtcattcatttgtttgtaagcaccgtcaaggcaaagagaccaggcatctgtctttcataccccagccacaccccctgaagcagagtagataatagatgcttacaagacagcgagtgatttcatctcagtatgtatgaacagcttcaatcacacagattttgggcagattcactacctaatcggatgcgagacttttcatttcttctgacctatattagtaaacagcaatataatcttttctaattacagacacataaaatgattgataaaatccaacaattgtatgacccctccacaaagcattttttacattcaagcctcacaccagcccctggaaatagatattatttttaatcttaattcatccagcattgtgctgggtgctggggatagataggccagggaagaaagattcgaagcccctgcttttatggagctgacttgctggtgagaaaaaaataaataaataaaacagcaaacaagaacaaacaaatacatcaataatttaagtcattgttaaatacgatgaaaaaaatggtagtatgatagagagtgatcaagggaggaagtgagatctctagagtggatttgaaggaaccagatctaaagacagggggttccagttaaaggtataataggagtgtccaacctttcggctttcctgggccacattggaagaagaattgttttgggccacacgtaaaacacactaacactaacggtagctaatgagctttaaaaattgcaaaaaaaatctctcttttttttttttgagacagagtctcactctgtcgcccgggctggagtgcagtggcgctatctcggctcactgcaagctttgcctcccaggttcacgccattctcctgcctcagtctcccgagtagctgggactacaggcacccgtcaccatgcccggctaattttttgtatttttagtagagatggggtttcactgcgttagacaggatggtctcgatctcctgacctcgtgatccgcccgtctcagcctcccaaagtgctgggattacaggcgtgagccaccgcgccaggccaaaatctcatgatgttttaagaaagtttacaaatttttgtttacaaagccatcctggaccgcataaagcctgcaggccatgggttgaacaagtttggtatagcaggaccaaagaccctgaggtcagacaaggccggcatttacctgaacagaaggaaaccttgataaatagaatgaatggggaggagaaaagtagaagctgaggtcatagaggaggcagtggccaatttagcgagagggcctcacaggccaagggcaaggggtttgaagtttattatgagttgatgggaggtcagtggagggctttgatgtatcattttggcctctgtggatgatggatggtggggagaccatgagtggaggcagggaggctagcagggaggccactgctggagtttagtggagagatatggtggctttaatgagaacataattgaaggtacaaaaatgggcagattgaagatgtatttgggaggcacagctaagactatctgcggatgtattcggtgtggggaatgtggaagagagaggctcaaattcccaatttatggttgaaactgacactcaaagggattaaggaatttctgtctacagccgcaaatacagggcaggcaaggactccaggctggttctctaattcccaaatgacagctcttctcattcttgcatgaggatatgaggtttgcagaaagaagggattcatgagtagtaagtcctcttaatcctcctagtatggatctaatgattttttgaggtcatgcgtagtaaacaatgtgtaatatccattcaactagtcagctgatttgtggttacttgcaataagtcattattttcaatggggtcgataatactgtctctgacactaggtgtttgtaaccacaaagtgcacttcagttgaattcctttccgaggttgttttatgttcagaaccaacctttcgtagttatatcattagttattagagggataccaggcaacagatcgagtttatttcttgtaagcgttcttgttgcagtcatatatttcgtggtttcattaaatcggccttggtagacaagctgttctttcaaatccctctgtgagcagcaaatgctgtggattgagatctgtattctccagatgatttgctaagtcatctcagaagagtcctctgaactgtgaggtgtccccagcccttttgtcccagatccaagaaccaaaaaaagaacttgaaatggggatcctgctgattgtgcctacacttgttcattcatttcataaatacttactgggccctccagtgcacaccaggcactgttccaggtgctggagagatacaagcgagcgagagaggtcaggctgctgccttcagggggcttcttattcgtgggcaaaacaagcatgacaaatgggcaaacaagattatcacagtttaatacgtgataagttggtcaggtaaggcctgataaggcaacttatcacgtatcaaggttttggcctctgtggatgatggatggtgggaagaccatgagtggaggtagggaggctagtggggaggccactgctagagttcagtggagagatatgaccaacttggttaagttggtcaggtaaggcctcctcaaggacacggcacttaagcaggaggctggaagtataacaaagcagctatgagaggagctggggaaatgcatcccagggagtgggaacagcgaggacagagccctaaggaaagtgtggtgcattgtttagtaccctgttggctgctataatagagaaacccaggccaggcacagtggctcatccctgtaatcccagtactttgggaggccgaggtgggcagatcacgaggtcaggagttcaagaccagcctgaccaacatggtgaaaccccatctctactaaaaatacaaaaattagctgggcgtggtggtgtgtgcctgcaatcccacctactcaggaggctatggcaggagaatcacttgaacccaggagccggaggttgcagtgagccgagatcacgcctctgcactccagcctgggcaacagagtgagactctgtctcacaaaaaaaaaaaaaaaatagaaaccgagactcacaggggtttaagcaagatggatatttatttttctgtcacttaatagcatgggtggacagttcaggactgatgagatagctctgcaatattttgggacccagactctgctgtgctacaatctggcattctcaatatgtgacccctacctcatggtccaagaaggcttctccactcctgccatcacacctacttcccggccattcagaaggggagaggggaagagacggcctcttccctatgtagaggcataatatccagaatttgtgcgtatcttctccaaaggagatggaatcagataagtgtgtggtaggcaggtcattcgggaccatgtagatcatgataggatattgcgttttattccaagagcagctggatgccgctgaagggttttaagtagtgaagtgacatggtctgatttatgtttttacaagaacactctggctgctgagtggaggatggatgagtggaggatggatgacagaagggcaaaagtggaaatggaagatcatttaggaagctgtgatcttaaggagcaaggcaaggtggactcagacactgagacatcatataattgtagctttagagtattaactgtttaaagagacaatgagtaaagactgaatgttcatgcacctctttctaaaatacagggacagcctttgcgtggacaacttactggatgagcaggtttaaggaattgtatcctataaaagatagacgtgaaaccagccaatgtgaatgtgccgccaaattggacctggttatatttgtggggacccttaacttaggaatatagaaagcacatgaaagtgcctgtcaagctagagccctgggcaggggcaggctcagtctcccaggaggttagagctggaggccctctgagctcatggattcaacccttgtgctgcaggtggagaaactgatggtaggagtatggggggctgtggcttgcccaagttcaactttggacagttgcagaatcaaggcaggaagccaggactggaagccgccactctcaccatgcaccgtgagggggtatccttgatgggatgctttctcctgaatcacacatttaccttttggcctcctttgccagcacctcccttagaacaagttcccttctttacctttccccaaagtcccctggcctgtacctcaagtgattccatcagttaccttgtcttccaaacaggactggccagatgacgatggtaaagtgattttgagagattataactcacgtttgctgaaatgttttgaagtttcaagacagtagtatgcactgtgaatgccagtgttgctcaagatcctagagacagccctgggtcctggagccccggcagcctgctccaaggtcaacaggcggggccccggcaattgtttggggaccattttcacaaccttaaggtaatttgtggttcctctgagaatgcccactgaagtgttccccctcagaatgctgtggatgggagatagaaggaaacaaaagaggaggaagcagtgaggattttactggatactgcagatgcacttccacatcggcatgggttcatactggattatgcaaaagtatggattctggaatgattcattccccccaaaacctggaactcgagggcagcatgctgcctcgttgtccataaaacactcccttttgtctctgcagggatcttaaaaaaacaaagcaagctttactgtggcaaaacctcctctacatattatcattgtctgattggattttaagcacaatgctatcttggtctacacattttcttatacaagtgacagtaatactaaaaatctcagaattattatcaagagccttttggtagggtgaaagtttcttttaagtattttcattttcaggagtgagttttcacacacacacacacgcacacacaagtatcaggaaacaaaaaggaaatgtgtgcaaacttccaatttaaatgttctacatcttagttgagatggctatgatacagatacatgtatttggcaaaactcatcaaactaggcatttaaaataagtacatttttggggtacaaattatacctcaatgaagttgattcaaaaagtcaaaagtaaaccaaaaattccaattttatattccattaataagtttttggtgtctgcttctggttttattaccgaggattctcatttgagtacactcagaatggaacagagctattatcatcgaacgtttcctatactgggactaaagtctggccaggaaattaacttttaaccctaactttgtgctattttgagataaaagaaatgcacacctcagaacagcaaggtgttacagcacataactgcctgtacaatttaaaaactcgataaacccaaagctttggtagcaagtcttagcaggtgctgagaaatacgaaacgattaatttttttttttttttttttttttttttgtaaaccagaaaacaagtctggtgttaagcctgttgtgcaaatactagcattaaatattttgtagcatatcttagttccaagtatttcttttctgtcacatttttctggttcctcctgataatcaaggcaatattctttgaactgtttccttagaaaagttgttgaaatgaccaaatttctaattccattgggatttggacacatttctgaaatggcccagaaatcattttggggagcccttaggctgctgttccaatccagcacataggtgtgacagcggagacccactcggacttcagggactgcctgcctcctccctccacacccatctcctgtctccccaggacctgtcctcaggagctcaaaagaagaggggtcttggtcctgagagggtgagggggcgaccgggaggaagcacttcctctctgtttcttaagacatctcccttccctgggacaacttccctaaaaggctttctttttttttttttaaccacttttccaaagtcagaaatgaatacattctgaaaataacccaactttctttttatgtttctttctttccacccccacctcaagcccctagaatggccagcccacctggctagcaagaacttaccttcctgagcatgcctggggacagaccctagcacacaccccaccctgggctcgtggcgggactctggctctggccaacatggagatcccagccacacactgatttggaggcctgagtgtcaatgacaaaagcaatccaaacccaaaactctcaaaattgattaaacaatggaaagcttggctttacatgagatgtgtggaaagcatcctgcatccaggtactcactggaaggcagaaatttagcagatgttgctattattatccttagggttaatcatagtgattcctgacttacagaatccaaataaaggaaatccacttcatgcatcagccgccagctgctttttttttttttttttttttttttttttttttgagacggagtcttgctctgtcgcccaggctggagtgcagtggtgcgatctcggctcactacaagctccgcctcccaggttcacgccattctcctgcctcagcctccggagtaagcccccagctgctctttgtggacactcattgcccagacccccactatggtcgatcagtattaattgcattaacagatttaattataaaattatttcaactgcctgtttttttctgtcttccattctgtgttataatagtttgccaggttagctccaaacacttaatgtctgttacttactcaatataatcccacccagtacatcacctttactgggaaagaagcttgttaatctctgtttaccagtctgctcccagttattcaaggactctctgaacctaaaatgtataatatgacctaggtcagaatggcgttcccataagtgagcaccaacagtacgcagcggctgacacgtgtgaatccatctcttgttcccttgaactgtgaatcaacatggatgtagccatagtcatatctatcaccttttgtgagaaaaattttactttgaaaacaaagtaatagactgtacagttaaaggacagcagaatccagcaaaggtctgtctgtatcacaaaggaaagccacatcatgtgctttattcccatcatcagtcaacatccattttttgtagctctgggaacctaggtgtctgagagccagcgctgcgtattggtagcactggttctgccatctctaagccccaggacaagtatcctaacagaactaagccctggcttcctcatctgtaataaaataagtaccttctagtattcttattttattgtgaaaagacaattctgtgcacatatggttacacacacatagactataatgacacttgcattttattggtattcacaacttttaaaaattttcctatttaagacacagcttaaaataattaaaaagaaatcatcacatagttattactgaagatttgcttctatgttccataaaacatggttttaaaatataaaaaaaagacacagcattgatttccttcaatctgcactttttttcccattttgctcagcacacaaccttttaactcactcttaaaaaaaatccaccataaaggactggaaattaagagaagggtgttatataaaaaatgccatgtgtgctctgacttacaaagtcttcttcagtccatgaactcacagacagtgtcagccactgagagtgtcgtcgtcaaaacgaataatagatgtggaaagccgtggctcctgctcctgagagctggacgcctcttggctgacctcctgcttgagccagatccaagaggtgaaggctgaagcaagagagctcccttgagaaagctccagagtttgtagcctactaaaccagcagtgtcctatattacattaattctcctgatgtattttcctgacatttgtcagcatttccttctatttgccaaacatggacaaagagaaaaccaggttttagaagtatgctcatttataaagtctctcctgagtcctcacctttccatcccttctgccatcacctcagtcagacccttaccccatcactcaagacagctgtaagtctcctggcttgacacttcgcttcaatctcactcatctctgattaaaattgtcccatgatcgaaaattttatgttgttttcgtcaccattaaaaaaacaaaaaaacaaaaaaaaaaacccttcctcttccaagatgctccagtgcttaacaaatcaagtgtaaactgatttgaagcgtgaggccctgcgtgatatatactgtaggagacctttccagctttatccaatatccatccctagtactttgctgttaccccatgatatggtttgactgtgtccccacccaaatctcatcttgaattgtagctcccataattcccacatgtcatgggagggacccagtgggacgtaattgaatcatgggggtgggtctttcctgtgctgttgtgatagtaaatgagtctcatgagatctgatggttttataaaggggagttcccctgcatgagctctcttgcctgccaccatgtaagatgtgattttgttcctcctttgcctttgcctatgattgtgaggcctccccagccatgtggaactgtgagtccattaaacctctttcctttataaattacccagtcttggttatgtctttattagcagcatgagaacagactaatacaccacacatgctcattgatttcttggttttgtgaaaggcccatctccctctcccatcagccttctctttgcaaattgtagcccccgttcaatgatcagttcagttggcactgacacccacaggcttcccttgatcctgtgccccaatctagatccatagctctctcctctggatgtccttcatgtgactgtgcatcatagccttctgtattttgcctcggtcagtgtttattcttgactatgagatcctgcagggtattgtagtataactgtttctctgtgcctcacagtgccaagcacagggccttttgtatagagcatactaataaaatttctgattccaactaaattcttgtatgcacacataggaagtgtgacttaatatatgcatatggaatcaaaatgattactttatagttagcatgtgtatgtttgtatgcagaaaattcaaaacaagtattcaaacaagcacaaagttgtgtaactaggaaaaacacatgctcatttactcctgacctgtggggcccaggttccaggccctacactatgtgatgaagacacaagacaagaaaatatggcaccttctttgagaagcttccatctagtcagggagaaaaacctgtgatcatataactgtagcaggccctattactcctgactacactggagaggccaaaaggagcgtgcctggttcagcctaggggtgttcaaggtggtcgtatcactggctgagggagtgtctgagggaacacacagccagggggctgggagaagcagggtgggtcagagcacaaagagacttgttcatcatttcgaggcgcctgtgctttctactagagatagtcactgaagcagaatgagaggatcctacgcagtttcagaaacatccccctgagggccaggtggaggatgaaatggggggaagaaggcaagatggcgggcagccatgagaccatggcaagaactctcagactggaaatgaggctggcttgagggaaatgggagacgggagcatttgagaatgtggagattgcatgagaagggatggcttttgggtgagtgaggatggctggcctgcctgttcacccgctgggagcctggtgaggtctcatccacttaccatgttgtctgggctagagagaggtagcacctgtagaaaccgcaattaggggtcctatgcttttgtttaactttctggaaatagaacaggcctcccttttaatacatctgttattcagcctttagatattctgctttcaagcgcgtaatcaggaatgcattagaataaagcagttaggagcagagtaacagaagggttaaagtatttaacttctccaggcctgtttcctctgtaaaatgagaaagaagataataatagcacctatttcacagaggagctacaaaaattaaagaagttaatgaatgtaaattgctcagcctagggccctgcataaaatgtgcacttaagacatcagttacttttttttcctgtgtgattggtgaggaaggttgagaaaagcatgaggactccttagctcttccgaaatacagtcatgtgctgtgtaaggacgattcagtcaaccacagactgtgtgtacagtggtggtcctatgagattataatatggttacttttactgtaccttttctgtttaactacctgtagatacacaaatactaccattgcgttacaattgcctacagtattgagtacaataacatgctctacagatttgtaacctaggaaccatagaccttaccatatagcctaagtgggtggtaggctctgccatctaggtttgtggaagtgcattctgtgacgttcccacaataacaaagttgcctaacaagactcatttcacagagtgtatccccatcactaagcaacacataactagtacttgctacagttgcaatataggcaaagcctcccttcttaaatataaataagcacacttttcaattcggagatgtattttgtatactaaatttgaagacattgttttgcctttttgtagggagagctggagattctgctcttatatccagagtggcatccgtgtgacatagtcattctttgtatgtgtgcctttagcctatgggtcattgtcagaatttagaaattcaaggtgcagccagttacattgctagagagatggaatatttcagagtctctgcaagcttcctttaagaaaaatgtcttcttttggaaagccattcagaaaacatactcagtaggacagtttcaacttattaaactttcaggaaatttttttaattgtctcacactgtctcttttgctgtataaattttaacagcagggtaaagagagaagcgttcttgaatttcactagctgcggagaaaatatttctcactgccctgggatacataggaaatcacagtcgttagtttcagatgtttagtttgggatattcaggtgcattcacaataccttttgattcattattactttaaaccatttgtggtttgatcctacaaattgaggacttttctccagatgtgaaaaatacaataaaattttctaacagaggggatctcgagaagaagttatctttatttctgcagtttctacaagagtccataaacccctttagaacatggcaaaaactgcagattggcagccatgggttggctggactgaaagggaagggggctcacatttaatttagagcataagaataagctaaacagcaaggcagtgacaaatgatacaacaagcaacaactcctagctgactgctccgaaataaacacatggattccaggcctcacctagaccaagaacatattctgcaactaaaattaaaccttcgggacatgcaaactctttagggaaaggagtggaagaaggagaagaagaaggaactcagaggttaccaagcaattgagtggtgaagagaacaggcatgaagaaaagagaacaggtgtgaagcaacgaaggaaattgcttctccaaatgaaaagttttgaaacacagccctcaccaacctcagaaaaatgctaactctgaaataggaaatggagacggaattggaaatggaacgtgaggaatatcagtaaacccttgtaactgtgcgatcaacttctttgtaagatttttaaactcaaaagtaaacacttttaaaaacttaaaagtgtaagattttaaagtggtataaagatcttaattaggcatttaggtagtgcatgctgtggagccccaaacttacagaagtgacaccagaaaaagccagaatgatccctttctgtgttccagtacttgtgggaaaaaattatttttattaatttgtaaagggctaaaatatttatggactaaattcagatgagtaaaaagatgaaggtgttagagtcgcttttctttcttttttttctttttcttttttttttttgagacagtttctctcttgttgcccaggctggagtgcagtggcgtgatcttggctcactgcaacctctgccccccagattcaagtgatctcctgcctcagcctcccaggtagctgggattacaggcacccaccaccatacccagctaatttttgtatttttagtagagacggggtttcaccatgttgaccaggctggtcttgaactcctaacctcaggtgatcacccacctcaacctctcaaaatgctgggattacaggcatgagccaccatgcccagcctagagttgttttaattttctatatcgggtctcatcttgttctgaggcatccatttctatgttcttggtttgggttgaggggagattgaagcttgcacttaaagtcaactaagtctctcatttaaaaagtgtttcttttaggtgaattcagtctctctgaggcaaatactcaatctctctgccttcatatctcctttccagagtgtcaaggggcccgggattacacgcagtcttcagggtctgtcttcatctcctaggctgtcataacaaagtaccacaaactgggtggcttacagcaatacagatttatcctctcacagttccggagcccagagctctgaaatcagggtgtcagtaggggtgggtcctcttggggactcagagggggaactgttcttctcttccagcttctgatcgttactggaagaccttggtttttctgggcttgtagaagcataattttactctctgcctgtgtctccacctgcctttctccctgtgtgtgtgtctgcgtcttctctttttataaggacaacagtcactgggttagggcttaccttaactaaagatgacctcatcttaactcgaccattgtattagtccgttctcacgctgctatgaagaaatgcccaagactgggtaatttgtaaagaaaagaggtttaattgactcacagttctgcatggctggggagtcctcaggaaacatacaatcatggcagaaggcaactcttcacagggcggcaggagagagagaatgagtgccagcaggggaaatgccagacgcttataaaaccatcagatcggccgggcacggtggctcacgcctgtaatcccagcacgcctgtaatcccagcactttgggaggccaaggcgagcagatcatgaagttaggggttcgagaccagcctagccaatacagtgaaacctgtctctactaaaaatacaaaaaaactagctgggcatggtagtgcgtgcctgtagtctcagctacttgggaggctgaggtaggagaatcacttgaacctaggaggcagaggttgcagtgagctaagattgactctagcctgggcaatagagggagactccatctaaaaaaaaaaacaaaaaacaaaacccatcagatctcatgagaactcactatcacgagaacagcatgggggaaaccacccccatgattcaattacgtccccccaggtccctcccttgacatgtggggattacagttcaaggtgagatttgggtggggacacagagccaaacagtatcaaccacatctgcaaaaactgtctttccataaaaaggtcacactcacaggtaatttgacatagctttttggggcacacaactcaacctgtaataggatccttacaggtctttgctgtggtggctatgctggtctggtggccacccttgtggcgctgaggtgctgaggttgggggatgttctgccgtggcttattaaagggcatagtgctagccatctcccattcttcctgcatctgtactgcgtgcaggctgcaggggagcacagcactacctaagccccatccaacagacaagtgtggctctcttaacagggggacttactactcgtgtgccaaattcaatgctgctaataggaagcttgaaagcaaacagtctatgctttggcaaggaggatccactctcactccagccccatgtttcaacgtttaaagggaagccagaatacatacacagatggtctccaacttatgatggtgcaacttacaacatttttactttaccatggtgcaaaagcaatacccattcagtagaaaccgtcctttgagtacccatacaaccactcttttcattttccctacagtattcaatagattgcatcagatattcaacatgctattttttttttaaacggagtttcgctttttgttgcccaggctggagtgcagtggtgtgatctcagctcactgcaacctccacctcctgggttcaagcgattctcctgcctcagcctcccgagtagctgggatcacaggcatgtgccaccacacctggctaattttgtatttttttagtagagacggggtttctccatgttggcctggctggtctcaaactcccaacctcatgtgatccgcctgcctcggcctccctaagtgccgggattacaggcgtgagccaccacgcacggcctcaacattctattataaaataggttttgcattagatgattttgcccaattgtaggctaatgtaagtgttctgagcacatttaaggtagggtgtgtttggtaagttgagtgtattaaatgcacttttattctgacaatatacaagacagtaatattattttttgactgaattagtggctgaattaataagtgaaagacaaaaggactgcttttgcagggtgagctcaaaaacgtacgatgggtttactgggatgtagccccttcatgctggaggaacctctgtacgtgtgtttccttagggctttgcaatcactgttccttctatctggaatgcttttttccttgggttccttttgagaggtgacagcgtgctggcagtcctcagagccctcgcttgctctcggcacctcccctgcctgggctctcactttggtggcatttgaggagcccttcagtcccccactgcactgtgggagcccctttctgggctggccaaggctggagcccactccctcagcttgcagggaggtgtggagggagaggcacgagcgggaactggggctgcgtgcgggccagctggagttccgggtgggcgtgggcttggtgggccccacactctgagcagccagccagccctgctggccccgggcaatgggggacttagcacccgggccagtggctgcggagggtgtactgggtcccccagcagtgccggcccaccggcgctgcgctcgatttctcgccgggccttggctgccttcccatggggcagggctcgggacctgcagcccgccatgcctgagcctcccacccactccatgggctcctgtgcggcccgagcctccccgacgagcgccaccccctgctccacagcgcccagtcccatcgaccacccaagggctgaggaatgtgagcgcacggtgcaggactggcgggcagctccacctgcagccccagtgcgggatccactaggtgaagccagctgggctcctgagtctggtggggacatggagagtctttatatctagctcagggattgtaaatacaccaatcgggactctatatctagctcaaggtttgtaaatacatcaatcagcaccctgtgtttagctcaaggtttgtgagtgcaccaatcgacactctgtatctagctgctctggtgaggacgtggagaacttttatgtatagctcaaggattgtaaatacaccaatcggcactctgtatctagctcaaggtttgtaaatacaccaatcagcaccctgtgtttagctcaaggtttgtgaatgcaccaatcgacactctgtatctagctgctctggtggggccttggagaacctgtgtgtggaaactctgtatctaactaatctgatggggatgtggagaacctttgtatctagctcagggattgtaaacgcaccaatcagtgccctgacaaaacaggccacagggctctaccaatcagcaggatgtgggtggggccagataagagaataaaagcaggctgcccgagccagcattggcaacccgctcgggtcctcttccacactttggaagctttgttctttcactctttgcaataaatcttgctactgctcgccctttgggtccacgctgcttttatgagctgtaacactcaccgcgaaggtctgcagcttcactcctcagccagcaagaccacgaacccaccagaaggaagaaactccgaacacatctgaacatcagaagggactgactccagacgcgccaccttaagagctgtaacagtcaccgcgagggtccgcggcttcattcttgaagtcagtgagaccaagaacccaccagttccggacacactttcacctggctcagagctcaaatgtaatctcctcagagtggccttccctgctcctgctacctagagtagcatctccccgtctcactctctcccttctcctgctttattttcttggtaaaatatcatttcagagcacgaggctttctttaagcaaaggacagacattttgcttattgctcaactagtttttgagctcatcctgaaaaaagtagcttttttgtctttcacttattaattcagtcaaaaaataatattactgtctagcaggctgggcgtggtggctcatgcctgtaatcccagcactttgggagaccaaggtgggcagactccctgaggtcagcagttcgagaccagcttggccaacatgatgaaaccgcgtctctactaaaaatacaaaaattagccaggcatggtagaatgtgcctgtaatcccagctacttaggaggctgcaacaggagaatcacttgaacctgggaggcagaggttgcagtgaaccaagatcgcaccattgtactccagcctgggcaaaagagtgagactccatctcatatatacttgagatgtatatatatgtatatatgtatacttttatatatatgtatacgtgtatatatgtatgtgtatacatgtatacatgtatgtgtatacgtgtatacatgtatgtgtatgcatgtatacatgcatgtgtatgcatgtatacatgcatgtgtatgcatgtatacatgcatgtgtatgcatgtatacatgtatgtgtatgcatgtatacatgtatgtgtatgcatgtatacatgcgtgtatgcatgtatacatgcgtgtatgcatgtatacatgcgtgtatgcatgtatacatgtgtgtatgcatgtatacatgtgtgtatgcatgtatgcatgtgtgtatgcatgtatgcatgtgtgtgtatgcatgtatgcatgtgtgtgtatgcatgtatgcatgtatgtgtgtgcatgtatacatgtatgtgtatgcatgtatgcatgtatgtgtatgcatgtatgcatgtatgtgtatgcatgtatgcatgtatgtgtgtgcatgtatacatgtatgtgtatgcatgtatataggtgtacatgtgtatgcatgtatataggtgtatatgtgtatgcatgtatatatgtgtgtatatgtgtacatgtatatatgtatgtgtacatgtatatatgtatgtatgtatacattatgtatacatatctgtcaagcataatgtcagaattagcaatattgattaaattatgtagtccttgaaggtagaaactctttttcactattgaatcctcaccacctggcatacaatagatactcaataattccttgtgtgggtgataaatgaatgggattccataacaaagttgatctgtgtaagacttttatttcactctttctataaaattaagtccacaatttttccatggatccttgcccaagaccacatgttgaaaagaacttatacgaatggcagatagcatcacggctaaagaaatagaatcttttgaagacaataactattttacttttaaaattgctcacaaattaaagaatgctggtagagataacaaagatgatttccaggagtaagaggccatcatgcagtttgtgatttccagatacttttgcagaaaggcaaccatgctgtagagtcagtagcagagttttcaccacctgtctaagacagaggaaaatgaccccaaaaaaaaaaggcaacttcaggcccttcttcaaaaatgcaaatccagggctacttccagctgtctccatagcatggcaaaacaatattcccagccaagcttcaagccattaagaaaaaccatcacagctgtgcgcggtggctcacgcctgtagtcccaacactttgggaggcccaggaaggcggatcacgaggtgaagagattgagaccactctggccaacatggtgaagccctgtctctactaaaaatacaaaaattagctgggcgcggtggtgcatgcctgtagtcccagctactcaggaggctgaggcaggagaatcgattgaacctgggaagcagagattgcagtgagccaagatgaagccactgcactccagcctggtgacagaacaagactctgtctcaaaaaaaaaataaaagaaaagaaaaaccatcacatatgtttggcaggggccaacatatccatggggttcagtaggcccacagtacttccagggacccacaaaagtgttctaataacatttaaaatcagaagaaaaaaatgaactgttaagtcaaaggaaaaatgttctaatatataatatgttaatacataatatcattatattcatctttataccaacacagtcctaaaatattacttttgatttttttttaatggaggaagaaaaccttgaaagcaaaagtgcctagggcctgtgaaagtcatcacatgaccctgatttggcgtctgctttgccttaaaaaagcattctagacagatattcagctggaaatactgaaatgggctcatgccaaaagaactagatctcttgttatccagaaaaccatattttctaggcagattcatttcccccaagatgcctaagagtcatgataacatattttagaggcgagattaatgcgatcgccccataaaatattttaagctctcatctgttctgaaacaaagtacgcaacatgtcaccaagagaaaatgactgctcataccgagaaaatgtattttcttcgaggtgccacagccactgtaatttgcacctcctgaagtgtagatggaagtcccctcaacatgtacagacagttaaaagagtcacggtaatgataggactagagaatgtgcccagctgagaaaataagcacacagcgagcattgtcagagctgaaaattaagatcccccaagcaaacatttcagatagagcccctcatcttttgttaaaagtaaaatgaaaatcaacagccctctacaccacatctgagccatggaagtcactccctttaggtgtctaagagacgactgcagcttcagtgcctggctcagattagctttgttcttccttgtctcttatcctttgaatagctctgacagtgccacaaggagtaattaccaattcgcagggggacacatcttcagttaaagtggattatctgcaagttgaggggtgggggttgctggcggctacaactgagttaggtattaagtataatctgcaaatgcagggagagttctgcagagccccaggcagttcttaactttctagaagtagctcccagctgaggcctcccctggtctccaggcatctggataatgtcttaactggtagagtgatggttaagagcatgagttttgggggcaaatttcctggttttatgcactggcacttcctagctcatgtgattctgggcaagttacttcactacagtgagcgacaatcagaatgggtccaaaattgtaccagccatagcaaggtgctgcagatgtagcaggacgaattgcagacaaaactcagacaccaagttaaagaaggaagaggtttattcagccgggagcatcggcaagactcctgtctcaagagccaagctacccgagtgagcaattcctgtcccttttaagggctcacaactctaagggggttccgtgtgagagggtcgtgatctattgagcaagcagggggtatgtgacaggggctgcatgcaccggtggtcagactgagacagaacagaccaggaagtttcacagtgtctttctatacaatgtctggagtctatagataacatcagttgctaggtcaggggtcgaattttaactaccaggcttaggtcaggcgggcccaggcctggtttcgggtctggttcctaggcactgggctacctgcctttagtttcgcttctctttccttttctgattatagaacaatataaaacaatatgagagggtctgtctctcttctctcacaaacattaataagacattgtgtttcaaatgctaagcatacatctaatacatggtaataaccccaagaatctttagctgttaccattatatttttatattttttttaattaaaattgaatcccttttttttttttttttttttttttttttttgtcttttgtgacagagtgcctctattgcccaggctggaacgcagtgctgtgatcttggctcactgcaacctccgcctcccaggttcaagccattctcatgccccaacctcccaagtagctggaattacaggggtgtgccactacacctggctaatttgtgccactacacccggctaatttgtgccactacacctggctaatttttgcattgttagtagagacagggtttcgccatgttggccaggatggtctcgaactcctggcctcaagtgatccaaagtgctgggattaccaacataagacatggcacccagcctctgttatcattattaagcattcatttaagccaagatctaaggggaaccaaggcccagtagcaaatctgctaatactcaggaaatgggtttgtgagaaatgttgctgttctttatcattattattattattattattattattattattattactattactgctacattcactatgagaaaacattcacgtctcagaaataacagtaataaggggtaagcattgccaggaggaggcagaaggcacatactggccaagtccggctctacgccctgtgtgtacagatatgtcttccaactttcgaaaagtctttgtaaaggttttcgctgatttgagctgttttcagctaagtcaccagaacatccagaatctaattttaaatgaaggttattataatgtccctcagtttcgtagcctcttattcaagagagattagaattctgtgaaggaaaagctttgttttaagttccaagggatgtaaagatttgctaggctgtctttaaatcccatttgggaactcaccatttatataaaaatggatgacatataatgtgtctttgggaacagtgaactctgaagagaaagatatggtcaaatggcccggcctcctcccacctcggaggatacactgcaccctcttcctacccctgatttggccctttcacaaatctcagctctagactgaggcagaaggacataaagatgcccatttccaaagctctccggctccccagtgcctctggttctatccatctttgtgacctgacgtctcagtggctgggtcccagatagggagctctggtctccggttcctggaggctgagcctgaatccctccacgcagaaagagagtcagggacagcaccgggggctgaatccctgccccaccttctagcagagtgacctcagtcaggtgactttactcctcaggctgtttcttttctggataacaaaaggtcattcaaccccatcttgtggattttctgtggagatttagttagataaaggactggcacacagggtgaagtgaggcagccttcccctcttccgcacagtgccacacagaacaggggtctgaggacttgccttctcccctgcatggctggtccccccctacccctgcccttccctggtgtttccaccgcaccccaccagctggaatgacatccaggattgaactcaatagccccttggcttacagggccactttctccacacctaccctggcagacttgatctcatatttgctttcagtataagatccagttgagcatccttccattaatgccccacagaacaagtctcagccttctccctggtgccggcctttccaacacctgaaggcagtgacggtgtgcttctagagtcttctcttccccacattcagcatccacagttccttccagtctgcttcacatgacaccgtctcaagcatggtgccatcctcaaaacacaccccggtttattattgctttcctgctcaagatgctctgtccagaactgatcacctctctggggtatgctgaccaccccaggggatggtctcagaaaccactttctaaattggaatatagactccatccttttcatgactcagtcaggtctcactcttaattcctaaatcccaaataattaacaaaaataccagagtcctgaggggttgctggaaaacaaaactggaaaaaaaaatccagttttcttctatcagccccattgtcccaacaaaggagggggagaggaggctacgtgcagttaccaggtgtgtcctatacaatttggtattgaaggtgattggggtgggggaaggcacgatggcatttccaaatatagaaattggttattcgtttctgctaaactgtatttagttatatctagggaaatcatttcagcctctcggagtccctttggctcacgataatgtcctcttgagtggagccatccctttttactaaatgccatatggcacattcatcaatgtgccattgatgtctttatccaagttaataaaatgattaaatgtaggcttggaatcaccactaaaattctccttgaagccaatttctacctatttatcaaattccaccactgttcatctcatgattaatctacctttaaaatactctcatgcatcactgaacgacagggatacgttctgagaagagtgtcattaagcaatttcatcattatgcgaataccacagagtgcacttacacaaacccagaaggtgcagccttctacacacccaggctctgtgctacagcccattgctcccaggctgcagacatgtgcagcacgccactgcactcaatactgtaggcaacggtaacacaacggtatttgttcactaaacatagacaaagtatggtaaaaatatgatataaaagataaaaattggctgggcgtggtggctcatgcctgtaatcccggcactttgggaggccgaggcaggcggatcacaaggtcaggagatcgagaccagcctggccagcatggtgaaaccccgtctctagtaaaaatacaaaaaaaattagctgggtgtggtggtgtgtgcctgtagtcccagctactcgggaggctgaggcaggagcatcgcgtgaacctgggagttggaggttgcagtgagtcaatatcacaccactgcactccagcctggggacagaacaagactccgtctcaaaaaaaataaataaaaaataaaagtaaaaattggtacccctatataggacacctaacaggaatgaagcttggcaggactggaagttgctctggatgagtgagtgggtggtaagtgaatatgaaggcctaggacattatactactgtagattttataagcactggacactttggccacattaaatttaccttttacaattttctttctttaataataaattaaccagctgggtgcagtggttcatgtctgtaatcccagcactttgggaggcagaggagggtagaccacttgaggtcaggagttaaaaaccagcctgatcaacatggtgaaaccccgtctctactaaaaatacaaaaattagcctggtgtggtggcatatgcctgtaatcccagctactcgggaggctgaggcaggagaattgcttgaacccaggaggcagaggttaccgtgagccgagattgtgccactgcatgcactccatcctggtcagcagaggaagactccatctcaaaataaataaataaataaaataaattaaccttagcatactgtaccttttctaactttatagacttcttaatgttttcaaactttttcactttttcatatttttgtctaacacttagattaaaacacaaacacattatacagctgtaaaaaatatttctttttatatgcgtattctataagattttgctatttaaaaatttgtttttaacttttaagacttttttattgaaaactaggacacaaatgcacacatttgctttggcctccacagggtgaggatcatcaataccactgtcttccacctgcacaccttgtcacactgggaggtcttcaggggcagtgacacacatggagctgtcatctcctgtgataacaatgccttcttctggaatagctcctgaaggacctgcctgaggctgttgtacaattaccctttttaaaaataaaaaataaaaaaaaagtaggccaggtgcagtggctcacacctgtaatcccaggactttgggaggctgaggcaagcagatcatgaggtcaggagttcgagaccagcctggccaacgtggtgaaaccccgtctctactaaaaatacaaaaattagccaggtgtggtggcgggtgcctataatcccagctacttgggaggctgaggcacaagaatcgcttgaacccagtaggtggaagttgtggtagctcagattgtgccactgcactccagcctggacgacagagcgagactcagtctcaaaaaacaacaacaacaaaaaagaagtatactctaaaataatgataaaaagcacattatgataaatgccaggcaatagaaaaatttcagctccattataatctcctgggaccaccctcctacatgtggttcatccttgaccaaagcatcattatgtggtgcctgactgtactactcaaacatattacaatgagaccatatctatttgtcttgaccacaaaaatgtcatgagaaacttactaaaatgctttgctgaaatttagatggcctctctcagtgctctcccacctaggaggctattaccccaatctgaaaataaaggaactggctttaggggttcagcagtgagaataggtgttgacaggaagaagtatccaaaggcctcccagtgggtctccggactgtgtcccttggtggcatccagggtggttgcgatcgtatggtttaaattttgtgatgatccactggagcttcaagttcagcctcaaagcattaggctctgttttctgaacatcattttatatggcaaggtcccgagattctaattttttcttgtgttaattatgtgacatggagcgtcagttaagggaaccatccaatacactttccagaaacagttctccctctcagtttcttcgtgtgcttgactggctcatggccctggggaaaccatcgctttcaatccctacctcaggtccatttcgtgatgtttatgcattcatgcgatcttagtcctcaaaggatttttttttcttctcttgggtaagatagctttagaggccttctgggataggaattataatacaactgagaacaaaggaagaaaaataaaaagtgaactactttctgttttactgaatcattcaacttgacattatctggaaatacaaaaatttgctaacacacttttcctagcctacactttgttatgctgcttgtgaaatgtatgaggtcaacacctttctacccttttttccccattgtcgcaaattctcctgctgtccagagttagtttcaaatgaccctctgctagtcttggccggcatacctaccagtggcttggagaggaattaaggaaaagcttgaaaactgaagctcatttttttgtatggtgttggctagagtttaacgtggttctccaaagccaaaaaaacattttagcagaagcggagcacacacagagataaattatttttctgtactacatttcagttggtaatttcgtacacaggattctatttctgctgctatcaagataaaatgcaaaagtggaaacattccaatgagtaagaagcaggtctgttcattcccagctcatgagaaactcaggacgcacattagtgttctgtttcccagcagcaaatagccaggacatatagcttcaatttactgggattcgaagaagtcaaatcagacctgatttcccatgaagtaaatcatagcacccagctctgtggtttgagtgacaggtacatccattattctgaaaggtcttgttactttcagcagagcttgttattcttagccctaaaaaatcatgccatgtgacagggcacctgaggctgaggaatggggcaccagcaccttccaggctttctatcttacatctgacaacttgaaacatccaggaaagaagtggaaaatccacatatcagatgtgtgctcctacccattccaaatgtctggtgtttgggaaacatttaagggatcataaattctcttttgtgtcaatgtttttggtactgtgtaattacaactatatatgtatagttatgtatatatgtatgttatactatatataaaactatatatagttacatatatgtatatatacaactatataaatatataaactataaatataaaatataaatatatatatttttatatatatatagtatattatatatatacaattttttttgagacagagtcttgccctgtttcccaggcttgagcgcaatgccgtgatctcggctcactgcaacctctgcctcccaggttcaagtgattctcttgcctcagcctcccgagtagctgggattacaggcgtccaccaccacgcccagctaattttttgtatctttagtagagatggggtttcaccatgttggccaggctggtctcaaactcctgacctcgtgatccacctgcctcggcctcccaaagtgctgggattacaggcgtaagccaccatgcccggccattacaactatattctaagattaactagcaatcataagttttttgttttcagtctagattttagaaatgcgaatgacaccaggcccaacactttgggaggccgaggcaggtggatcacgaggtcaggagttcaagaccaacctggccaagatggtgaaaccccctctctactaaaaatacaaaaaaaaaaaaattagccagacatggtggcgggcgcctgtaatctcagctattcgggaggctgatgcagagaattgcttgaacctgggaggtggaggttgcagtgagccgagattgcgccactgcactccagcctgggtaacagagcaagactccatctcaaaaaaaaaaagaaaaaaagaaacgtgagtgacaatttcaacctatttagtatccccaaaagctcaggagctgtgataaattgatacaaataaaaatgtaatacttcatctttttgcaaaatagtgcagtgggctctatgaagacatttctttttattgttgactctggaaagaaaaaatccagttttgtgttatcagtccttagaaaaagatttatgagttaaaatgcagcagaggccaggtgcagtggctcccatctataacgccagcactttgggaggctgagggggataggattgcttgaagccaggagttcgagaccagcctgggcaacataatgagaccctgtatctacagaaaatttttaaaaacaagccagtcatggtggtgtgcgcctgtagtcccaggtacttaggaggctaaggtgaaaggatcacttgagcccaggggttcaagggtacagcgaggcctatgatcacaccgctgcattcctgcctggctgacagtgagaccctgtctctaaaaataattaaaattcaaaatgtggtagagacactagaaggaaaaatgattctgcttctcccagcattctgcctctgcataattgagttagtgcatttcataggtcaagaactatttaaattacacctgcatattttagtcctgcatatttcttcataagagagaaaagcatctaataaatacaatgaaatttcattcatgtctttatttaagggatgaataaaatgtcacagtacctaatcgtatacatcaattatggatccagatttaattctggctgtgcctctttggaaaggcagctgatgagcaagacatcactgatcaaaaactgcattctgttagagcaggagctgacagggaacctagatgccagcatttccatgccctgcctgatgtttaccatttgatcacgttcgaactgaggaatgaggcttatcggattttatgttgctttttttagatgaatgctcttggctttttgttgttgttatggttacttcccattgatttattccactaaccatttagactcccgttcattcacctacggccaaatgggactagaatggaaaaacggaatcctacccgatcaatgcaaattctatttctctctctccaagaggcccagatgaccagccctgacactgggagccactgggagcttcaggtgctggcccagcagtgcctggccatgttttcaagtgtacatcaggtgaccactcacctgttgtacttcagtctgattttccaaggagtatttaaaaccacccaggcagtgatttcaaaccgactttctacttattccacaaggtaccgtcgaaccactgttctacgtgtgaggcctgtggagggtttatacagcaatgagtgttcagtgttaagtcctgccttccttcatagaagagaaatttatcagttcctctgggtgtcagttttagagcaatacaacaacgttttgaaagacaaatccatttttaatgagacggacagattttcaggtaatagtactgctagaaataacatataatgatctactggttctgaatacactgctgaattcctgaatacgctgaagacctccccctcctctttcctggttatgttctgcacctgtttacactatgaagctgaaaaacaaactttgactatagctaactatgattgttctaatttccatagtacttgatcccctcccacacaccaaactatgaatgacagactgctgaatagatggtttcagtcatagaccgtccctgacttatggttccacttagaagttttcaactttaccatggttcaaaagtgatatgcgttcagtagaaaccgtactttgaatacccatacaaccattctgttttccactttcaacactttattataaaataggtgtgttagatgactttactgaactgtagactaatgtaagtgttctgagtatgtttaaggtaggctgggctatgctatgatgttcagtaggttacgtgtatttaatgcatttttgatttacaatattcccaccttacgatgggtgtatggggaggtaaccccattatacgttgaaaagcatctgtatattcattcctacagtcactggtgattactttgtccaaggcattattttgggggaacacaaagagaagtgacatttagtcccagctgtcaagaaaactttaattctaggaaaggcacagttgcgggcctctggcccatccgaagagagcaggaacacacctggtccagttaggtagagccgggagcagaatccaggaggaagccccactcagcgggggtctctggtgttctaaagtgatggatagtgactggtactaagtgtgaggggagagggtggattacacctgaatagtacagaggctctaaggcagaacatccagggacttagagagacgtcaaactcctccacaacaatgttccccaaacaagagtcatttgaggaccaatgtcacgatttttgccatttctgatgacatttttaccatttctagtggcctcctttactgttgtttacttaacattttcctttaaatggactcactatttttacttaaataaatttatgttaaaaagtttatgttaaagagaaattttgcaatactaccatgaaatgaaatgccagtaccgcttgctgtcacgatacggtggtgctaaaaatacgtaatataaaaatataatgaaactcagcactgttgcccaccgaagcatccaggtctgaggtctgacctctctttgttaaaaagggaaaatagcaagtattggcaccataataaagatagtccagccccacactgagccggcctgagactctgagaaattgaaagggaatcggggaaggaataagactggatgttatttagctcccagtctgtgaattacctaaagacccccagtgccaccagtgcgacatacttcaccccagaacagagggaaggaacagaatggtaggcagtgctttggggccagttgtactacagtctctgcagagcaaccatatgctgtgtcagggctggaaccaggtttggccatctgtgttgaccccacagattctatgaagggtgacttccacaatccctagcacactggggagcacacagtacatacttatcaaaagtcttaaattaagtctcactgatgccctaaaatcttctgcctgtttcataaaaagtagaaaatgaagttgacagtgattctttgtatctcataatatcacatcgccctccccaaaaaggaacattgatagaaaactataagatataaaacctaacaaaaatcatctggtgaatagatcccatggaatacacaagaagaagatataggtgcatttaaataatctcaaaggaaaagaagaaatctcctttgagaagtcacatctaaatgcttatccaggctgggcacagtggctcatgcctataatcccagcactctgggaggccgaggtgggtggatcgcttgagcctagttgtttgggaccaacctgggtaacataacaaaaccccgcctctacaaaaaaatactaaaaaaaaaaattagtcgggcatggtagcacacgagtgtggttccagctactcaaagaggctgaggtgggaggattgcttgagcccgggaggttgaggctgcagtgagctgagattgtgccttgcactccagcctggatgacagagtaagaccctgtctcataaataataaataaataaatccctgtccaaataaataaatgcttatccaatcgctgaaaaggagctcaagcatgtacacgaggccccaagcacagctctgtcctccgtggagctggctttattctcccagtgtttcctgctcaggtgcccttttctctttcatttctcacaacactcccgcctctcacttggcattcagtaactgaacaaggagcgggaaagcatgctaatgcatcgcaaatggagttgctgcatttccttaaaaggactgtcatgagcatttcattttaacgtattacccggaattgtgtcagtgttttaagtgaactattttctgtaatccatatcgttatgaatataagacattaacgtactgattgccacttgagaatctcattttaaagtgattgtactgcatttctaaaatttgcatttttaaagcaagtttcccccacaaataacaccttacccaagacacctccaggcagaacgttgtttcttacagtaaatgatattttaatatttggtttcagtagagaccagtctaatcaattatagagtaacatactttacttgtaataaattcaaaaaagtgatagctatactgtcatttgtagatgttcttaagaaatatggaatcttattccagacaggcatttctataactttgtggtgctatcaatgatgctaatgaagatttgacatcagttcaccacatttttgaaaatcaaattgttggctcagccgctaatgaaacacaatctcaaagcagttttaacaaccatttacattttttctgaaaacctcactctaccgtttctatggggtccctgactagaaatatcaaaagtctacatgaatataaaacaatatagtctatttttcaaagagaaattgagactgatgcaaaatatttgacttcttttttttttatatgaaacataaatgtttattcattggcaaagccttaacttctctaagcctcgtttccctcatctgtcacttggcgggtaatcctatttagctcagagggttaccaggagacttaatgggatactgcataataagtactaagcacagtgccccccatcatgtactgcccttggtctgtgctctaatattgaagcaggatgcttccctgaccgctttgtgggacttgcaacaggggtgccctcaattacccagcccacagctttcaactcctcatgggaggaagcacgcatgtgaatgaggcaggaactggagtgcatgaatgctgaaaccagccagccacttaggtactgccaggagcaaacgccactcacttggacccactgtgctccaccccttgcaggggtaagcacgcgggtgagtgggtgcaggagccagggtgagcgcttttgagcgccaacaggagtgaactctgtgcaggctccgtggcagcatctaggggtggtgcctgcaacccctgaagccccagagggcatgttacagtgcttttagttctgctgtccccagacagcctaagtatcaacagctcagtggcttttcacgtaagctggctgccttctgccagtgagtacaaagggcaagtgtgacagccttttgtagccacactagcagcatccgagctcttgtcccacatccaggagaaatgacatcacacaaattgaaggatgacaaatgtaggggatttttattgccgatgaaagtggctctcagcaggaagggaagttgaaaaggggatggagagggaaggtaatcttctcctgaagtccagccatctctggccagattcttctctgatgttacgtgtcaagctgtccctctgaagtgaagctgcttctctccaatgtctaaccatagtcaccaacgtccagctgcttctcttctctctgccagctgagtatggggtttttataggcacaggatgtcagggggcaggcccatgggtggttttggaaaaggcaacatttgagctggaaaacagggatgtaagttctcactttgggctgcagtttctggcttgagggtgagggtttgacagggacccgcccctttctgcctagattttctctgccacctttctctaccattgtatcaatattattatcacatggccctgagttggaaccatcaggtcctgcaaactccagagcatctacttactgcacattggcccccccccaggggaattggtcccagccaagggtctctaggaaagaggcacatcaactagatgtggaacacactccggttttggaagtactggttctgttctccagggcatcagaatcctcctttttgtgaccctgctgccttacaggaaagaaacaacagttgaaacactgggaattttccccaatagggagaaggcacagaaaggagaaagctaaagaagagagtgaaagaggcccaaagagaatggaaaagtgagagcaggccatttgccagggctcattcctgccatccagccccagcttctggctgctcagtggacgcttctgccaatgctcacagccccacaggcctgggcccgggagcctctgctgccacccgtggtttctctccctgttccaccatcggaaccccgtgccccaggctctctcccttgaggccacctcagaaggagataccaaggggaagacagctctttaagaagtgtagactccatgttaaattgagaccccgcagacagatacggctttgaaacaattgattttctgtggtgtcatagggaaacctgccctcctcaaagttgcgaaaactgtcagggaccctatgaaatggagcgggagtcacaagttttctacccagctctaaaagaggagacaaaactaacactggttcacaatagataacagaacggcttcagcaaagggcaagcaagcgtagagagatgctggagaagaacaaggcactttatccatgtcccccacagcaccctgcctcagcgccggggcaaaagaatctttgtgtgagcccagggagtcggcagggacatgaggggttgatgcggcacttgctcagagcaatcgcagtgctgccgctggaattatctttctcacacagttcccagtagtggttaaaaggctctgaggtcagtccgcctggcccactagctaagggctcttaagcatttaaggactctttcaacatttgtttctgttagtttctaaaacttggaacagagggccattgatttaactggtataacaacgtgtgggtacattgcacttgttaccttggaaatgcctctactcagtctcacctctgagctgagttagtttgggaagatgttgagcctacaggtagtggggagatggtgagattcaccaaggcatgtgttgtttgtgattgattgggttgggaaagtttcctgactgccaaaacctccatcagacactagccggggattctgtaaatctcagaattccaaggggattggattttgaagaaaggagatgttcacgtacaggctactagaattcttgttctttttttttttttttttttaaagaattctgaagaagaaaataagtaagagatctaaaacagaaccatattttgccaggagggcagagcagggctgctttgttcaatttgttaagagggtcagggaagcatcagaaaagataaggagaaaaatcaatcagaaccaagtcactgttgtgagtttcggcagcgtctgaagtagccagaaggtactgagaaatgtattttatcacatatagtcttattttcaccctaccgtattttctgttaacacaaggttcctttaaagtcaagtatgcagccctaaatcttatcgacccattaatatttcatccaaaacaatgtaacatcttaaactgaaacctaaatgtaagctttggacacaagcattcaaagacaggtatgttgtacagctggactatggtgagtcaagtaacattttcatttctttttttcttttagaaacagggaaaattgaccaagagattcacaaatacaacaccccaggattcactggttgcctctccagagtccagttcaaccagatcgcccctctcaaggccgccttgaggcagacaaacgcctcggctcacgtccacatccagggcgagctggtggagtccaactgcggggcctcgccgctgaccctctcccccatgtcgtccgccaccgacccctggcacctggatcacctggattcaggtaaagtcttcagcaacctcaggcaggttgcttcatttctttaaacctcagtctcttgggactatggaatggatttaataacagaacctcactggtaatgtcattggaggattaagaaagggcaaaggaacgttgtgagtacggagttctcagggcagcacttagcacatctgaaatactcagggccagaaataaataagttgaaggtaaagaatgtaggaagtattaactcttcaattaggttaaatgatgacttgcctaaactgatgtctgcgccatgactgtgggtgatttgatcaattcactgtctcacttttgcctcttatgactcttaatgacttgctgtaacataatctgtgttttaatttaagaagagatttacctaaagcaatatagagatccgtctcctggctctgtatttatatgaataatactggtggcttccagatctttaagaggtgcctttaagcttgcaaaactctgtggatttagtcccacttctttgagtgggaagacatgtaatttgaaagcacagggctcaaatgaaaggatgtagctgttggctgaaaaattaattggatgaaaagagtatacacataaccctgggtgggagacagcctattaagctgtatctcaggagacttaggtcgtactcctagctccacctaaattggccttgggcaactcaagtgacctgcccaagcctctgctttttcacccataaggtgaagaaggggaggggagtgtaacctctaagtgacctccgaatccaacattcagtgggtctccaggcaacatgtgatgttgctgaagctaaaaagaggaagaagatgaggcaggaagcaacagctaggaggcctggattccagcaccatcactgcctctcaccagcagattaaccttaggcagttttcataacctcattcctcagtttccccacttcctaaatggagataagacctaacccttggaattctatttaaagtgatgtgtttaaatctgacgtgttttatcacaagcgttaaagtttagctacaataatattaataatctaatattattatattagacacaatttgctataatgcttgaaccttgagtaaagacttccaaatcctctccccctgcaaacttgtaatttgtaacagttcattctctaaacctcgtgcatttgattgctttaatcatgttccggccctgcacatggagtgtgtggcttcagtgcagccattgtcattgtgattccttgccagggctgtgctgcaaagctttgtgaagcttagagagaagccaaaattgccctgttgtcagaataacccatttacagacgaaacaatcctctttgttcctcacacatggattcctagaacttgacgcggggcgctgtgagctaagggcacgtatgaagaattcccttttatgaatgttgttaagattacacagtgggctggcttgaacaaaggaaagcattcctaatgctgaaagaagaaaagtaagagtgaaaatacaagaggagaaaagacatgtcagggccacagaggaacagagatctctcagataaattcctccaaatgcccgagtagacaaataccgtgaatgatctttgcaaggcaggagtccttccgctgtcaaagggacccactgcctgaggctgtgagcacctgtggtctgagtcagggccaatagactagtttctaaaacatctagatcctaccttgggccaatatgagttttatgtattattacttaattaggaacttgtttgttaagatctgtgagatatgactgtagggaccaaagagtttttgttcctttactttaaaaaaatcatgctttgagtgtgacaggttttttttttttttttttttttttggagacagacagagtctcactcagttgcccatgctggagtacaatggcaccattgcaacctctgcctcctgggtttaagcgattctcctgcctcagcctcctgagtagctgggattacaggcacccgccatcatgcccacttaatttttgtagagacaggatttcaccatgttggccaaactggtcttggactcctaacctcaggtgatccacccgcctaggcctcccaaagtgctaggattacagagtgctaggattacaggattcttttgattgatttatgaaaatgtatatagggaacatatctgtatttgatgttcaaatccaaattctgtaattctgatattatggtaggcctgtgctatgtaacatgagatccatttgcagaaaaatttccacttacacttggagagttcttacccagtgtccagcagatgaagtattaatgcaattgtcattataccaattacaaggacagaaaacagttgaccgggctcggtggctcacatctgtaatcccagcattttgggaggctgaggtgggtggatcatgaggtcaggagttcgagaccagcctgaccaacacggtgaaagcccgtctctactaaaaatacaaaaattagctgggcgtggtggcgcacgcctgtaatcccagctcctcaggaggctgaggcaggagaatcgcttgaacttgggaggcagaggttgcactgagctgagatggtgccactgcaagactctgtctcaaaacaaaacaaaaaaacaacagaaaacagtttacaaactataaggcagaggtttattgaaataatatgattttcctcttttaggtgaataggaacatgagagacaatgtgggttgaggggctggaaggggcagaggacagacgtagaaatgagggaaggttacttaacagcagcctctggttgctcagtgtcagggaggaaaaacttttcctctgtcctcttaagttcagtacctgggggcctgcaaattaagctgataaaagacagattaacaggtgggcagggggaccttatttatatgcatataggagcttgaaaaagaagaaactcagtaagtagttaaagctagaaacttatatgcccagcttagtagggaaaagaggcagtgggggaaaaggcctctataggaggaacagatggatttctagaagaacaaatgagagataaagagtttgtgatagtgcttgttcatgcaggcctgagtgatctctgtatctcattcatggccataaaacttccctggagagaggacttacggtaggtttcttgatcatcttcctgggagtaaaagccacccgtaagagggaggtatggcagcctcatttttccagaagtctctgctttttgtcagataaaggaagcaccaagaaggcttctttctgcacctattgaatccccagtggcttcagtttaaaatgagttccataccaactcgggttctaagtgcatccctcacatcagcaattgcactctggtttcgtgagcctaaggtcatcattctgaatttggactttacggttttgcacttttctggtaatatttcatgtttgactagaataagattccttgctatcagatatttaaaaacaaaacagtatatacacaaaaatgcctttctacctgtaaataacgtgaggtacttgagtctgtgtagggttaggatggaaagaaaataacatgagagctcgtgagtcctggcttgactagaggacatttggaagtagattatctcatctggtgccttggaagtttattcctcaacaagcagcaatgggtctcctggaagcttttttagaaatgcagaatctcaggcccctccccatactgactaaatcagcattcgtgttttttagcatggttcccaggtgacttaccactgcaatttaaaagctctaatcttgtatagtgcttctcaatctgggaagcactttaaaactacctggggagctttttaaaacccaaaactacctggggagctttttaaaaccctgatgtcaagactatacttctgtcagaggtgtctgaaccagagcaactccatctcgaataggggctgggtaaaataaagctgagacctactgaaaactggttgcagtaaagaagccagctaaaaccatcaaaaccaagatggcaatgagattgacttctggtcatcctcactgctacactcccatcagcaccatgacagcttataaatgccatagcaatgtcaggaagttaccctatagggcctaaaaaaaggggaggcatgaatgatccaccccttgtttagcatataatcaagaaataaccataaaaatgggcaaccagcagcccttggggctgctctgtctgtggtgtagctattcttttattcctttttgttttattattatactttaagttttagggtacatgtgcacattgtgcaggttagttacatatgtatacatgtgccatgctggtacgctgcacccactaactcatcatctagcattaggtatatctcccagtgctatccctcccccctccccccaccccacaatagtccccagagtgtgatgttccccttcctgtgtccatgtgttctcattgttcaattcccacctatgagtgagaacatgcggtgtttggttttttgtccttgcgatagtttactgagaatgatgatttccaatttcatccatgtccctagaaaggacatgaactcatcattttttatggctgcacagtagtccatggtgtatatgtgccacattttcttaatccagtctatcattgttggacatttgggttggttccaagtctttgcaattgtgaatagtggaggaggagaggtgctctgctttttagagtttccagtttttctgctctgttttttccctatctttgtggttttatctacttttggtctttgatgatggtgatgtacagatgggtttttggtgtggttgtcctttctgtttgttagttttccttctaacagacaggaccctcagctgcaggtctgttggagtttgctagaggtccactccagaccctgtttgcctgggtatctgcagcggtgtttgcagaacagcggtttttcgtgaactgcgaatgctgccatctgatcgttcctctggaagttttgtctcagaggagtacccggccatgtgaagtgtcagtctgcccctactggggggtgcctcccagttaggctgctcaggggtcaggggtcagagacccacttgaggaggcagtctgcccattctcagatctccagctgcgtgctgggagaaccactgctcttttcaaagctcagatggaaatgcagaaatcacccatcttctgcgtcgctcatgctgggagctgtagactggagctgttcctattcagccatcttggctcctcctattcttttattcctttactttcccaattgatacagtttgactatgtccccacccaaatctcatcttgaattcccatgtgttgtgggagggacctggtgggaggtaattgaatcatgggggcaggtctttccatgctgttgtcgtgacagtgaataagtctcacaagatctgatggttttataaaggggagtttccctgcacaagctctctctttgcctgctgccatccatgtaagacatgacttgctcctccttgccttccaccatgattgtgaggcctcgccagccgtgtggaactgggagtccattaaacctctttcctgtataaattacccagtctcaggtatgtgtttattagcagcatgaaaacaaactaatacactaataaacttgctttcactttactctatggatgcaccctaaattcttggatcttgcgtgagatccaagaaccctctcttggggtttggatcaggaaccctttctagtaacacttccatgcaccatttctatagtttcttaccagagaagtttctctgaacatgtggagcaccggaaaccacgaggaggcggctcagcattcactcctgagcatgaagctggctcttggtggtgcttctctgcaattgccttttgctgctgatgatcactcttctcttcctttgggagagtgaaagggaaaggaagccatctgaagggtcttcatggttattttttaaaaagaaaaatcccaatatctagtactaaacccctgacggaccaaatcagaccctcggggggataggagggacacaggtgtgtgtgatgtaaacccccctccccaggagtgtccagtgtgtgaccaaggtcaagaatcactcaccaaatgaaagaagggtccctttggtaagtgcatcaaaataaggttaccaaaagaaaaaactgaatacccaaatactgcccaaaacatggtttatgaaaaacaataaagccgttaggtggttaaatcacaaatagtaaaggctgtaccatcaagcttgcaaagagaccaggctctccggccattttataaggaagctcactcagaggagatgtttttacctaaacttgaggagaactgatctgcctgtttgcaactggaaagcagacttgaaacaaacaaatgaacaataaatttgcagtgtggggcaggactcggtggctccagtgaaagcacctcattatgaggaagatgtgaaattattactgtgttttgaattggctgctaacctactctgaaagatagaaaaagatgctgctttaaaatgagggctgtgcttttctgaaaatacagcaggtgccttgctgtgaagagtaaggaatcatatggccttatggttaaagggatcttggcaaaccagggctactcaatccatacctataccaggatgtttgcatacctataccaggatgtttgttttgcaggaacttggtgttagaatggaaattagaattgaagacatctacccataggtctggtgatctttctgctcccatacctgtctttctactgtctgagatcatagtaaatgataaaaacagaaaataggttctaaggtatgctggctttagtaataagattctttttctcatctgtaacactactgttacacttctataacaaacactatttgttacctctccaatgtcctttgggctctatcagtgttttctaaaatgagggacatttatgttggtcaggttgtgcactgcacaactataacagatgtcatttgtagtgcagtctctggcttctggagcagtgcagcatgtagcctagatagggggtcgccattatgggaagcaaatagacatggcctcgtgtaacatacaaagcaagtcatttcctgttcatttgtctttcagtccttctgattttataaagagaaagtctctatttggttctggcacgcttttaacacctctcccatgattgtattttaccttataataaagagagaacaggcttctggttagtgcctcacaggcaatagaattactcagtagggatgtaaagttttatcaatagatttatataaataagaaatttaaccaattttgtgaaaataagtaaataaataatacttggattttacagtatatgtcaagaaaaatatgaaggtgattttcacatgattggagtttgggaaacactgggcagtagagaaagatcaccccaagcgctagggcctagcatggggctttaagaacacatttttatagggggatgaggtaaacaaaagacttacacattatgatttaagttgacttgatttaaaacaattctgctctattggaaacatccaatctttttttcttctagttatttccctctttgataataagtacagcctgtttctaaaccattatatggtccttaggaatatttttagaacagtagttacaaggtagaaaaagtaacccccagccctgagttaaggtttattttaaggtcacagaatgccaggcaattgccgtgatttacctctcagaattatggactctgttgtgtttcttcctttttgtctaatttagggaatcttatttgcttggaatgaaaaggatttgccagcaggaagacagccacagatggcagtgcacattctgtaaaatacaaaaacaaaacaaacaccagaaaaaataaatccaagagtctgatcccataaatttctgcactaaggagcaactccaaactgcacaccaagctgctttaaaaggcgtttgtgttaagccttagagtgttttatcacattcgtgatatttgatacagaatacgtcagaccaaaagccacatcctaggatcttctttaaaatatcattaaaatagatgaagcattttaagatgtaaagtttcatttcctaagggatcctctagttgtaaagattgcagctagttgttgttgttattattatttgagatggagtctcgctctgtcactaggctggagtgtagaggcgtgatctcggctcactgcaacctccacctccggggtacaagcaattctactgcctcggcctcctgagtagctgggactacaggcacgcaccaccacacccagctaatttttgtgtttttagtagagacggggtttcaccatgttggccaggatggtctcgatctcttgacctcgtgatccgcccgcctcagcctcccaaagtgctgggattacaggcatgagccactgcgcctggccacagctagttattttaaaggacttctagtaggtccaggctagattctcagcaaagtttgcatggtatgtgatgtgtggtgcatctcaccccagaaaggacctgggagtccttctgtaaattgctagcaggtgaattcacagcatccactgtaaccttaagttatctggttctctgccctaacgctaacctgcatctgacactgggaggtccttgaccaggaattctcacagctcctccaacagggaagtgggtaggagatggaaaattcagaagcaggagtggagggaagggagttaacacccaattctccacctcccccagaaccaaggccaggattgtcaagaatccagggttgagaatcccctgccaagctggtccagtggattcactcaggttggcagagtggctgaaaaccagccctcttaggcacgtgggtcttctcccagatatattaggaactagatggaacttggcacttgggatcactcagtgtaacaaccccatacccccattagacttgagtatacccagcactgagctaggaactcactcaggcttcccgtcaccacatcggacactttaccactggccacagattggtttctgaagacctcttacctccatcgttatgacttctaagttgatttctgtctatattccaagtttcctttctatcatctggccataaaatatttttatatcttcatgtgcaaagagttatggatataaagaactttttaaaattacatatatcatctattctgttttctacctaactacaagctgatcattggttttctttaccacctgcaagcacttaaaagtaatcattcctgctcttataattacatctgaattatttctgaacagatcccttttctctccttatgctaagactgcatgattaatgcatttttatctctcacactcagtctttttattatgttatttgtctttttccctcttcagtcaccaacacagttcacacttaatcgtgtgaagaaaaactatcatcccttgcttgctaatgtgcattttcctgcaaagatccaaattccacttttcctgcaaaaacaccaagcgcatttatgtatctcaaatcaactatggtattagtcttacctatttttgcctggtcattttagttgtatcccaccttttgtttctacagtgttttcatagaaaatcagtttctacagtgttttcatagaaaatcacattgtatccatgattttgttgagtcaaaggatatgtgtgtttttaattttgatactactacaaaccatcctctaatgatataatccgattgacagtccagcaatctatgaataccttttccccacatcctcaccaaaacagtgcatcatattattcttttaaatgtggctgttctatatgaaaaataaaattttcttgttatagtttgtatttcattaattatgagttgggttaagtatctttgcatatgtttatatatcatttatatttatttttccataaactccctctttatattctttgctccaataattatttatatctttatattctttcctattgatttataagtattcttaatatattaagtaaattagtatttttaatgttttccttgtttcatctcaatttttttgaatttatgggatttttttttccatgtaaaagttactaaattttacatggtgaaatgtaaagtgttttatggcttttgggttttgtgacataccttctccatttagaacttattttttaaattattccatgttttttataataattttgtgttttatttgtaagttctacgtattttcttccctggaaatttatttgggtggaaggtggaaggtaaaaatctcactttattttttcccaaatggcccactgttccagccccattggttgaggctccatcctctccacctttaccatcttctaaattcccttcatttctgagtccctactggactctctggtctattacattgatatgatgccttgtgacatgggagcaaactgcagtacttatcattgagcttttattatcacatttagtggctcatagagctaatttccctttttttctgagttttttttcccagaattttcctgttcatccttgcacatttgcttttcccatgtggatttgagaattttaatcattttattggaattgtttaaaatttttactgggattaaggtttatgtataagttcattacctggtgatgcccagttacaccatgcgtgtcttctccatctctctccaagttgcgaaatgattcagataagtgtcatccagattttaatgtgcttagaatcacctgggggaaattagcaaatgcagattcagctggtcaaacatgggattagagattctgcatttccaacaagctcccaggtgctgctgatgcagcgggtccctggaacacactgggagtggcaaggagataagcagccttgaggcactgcctctggtagatttcataggtttcccctggaaaaccacttgagcccactgcttcttgtgggagcagatctttgacaactctctcaagttattttatgataatctgtctaattagattttctttctcatctaggataatacccgttattttatctttttctagaaattcgtgcatttaacctaggttttcaaactcattactgtggagttgaacagaaacttgttaataatttaatttccattccctttttcgtgttttttatattgaatgtttctgttgaccccccccccttattgattagattatgtggctttttttttttcttttctcaaagaaccagctcttagatttatttgtcaattctttgttttctttctactgtcgtgtcttctttaaatttatatttgctggcctctaactttctaatttgaatgtttggctctctctcttattttccttcttggtggggtgtgtgtatcatggtcttataagaatgtgaaccgaagtcaacaaatcttaaactccagccatgctctcttctgaccacacctctgctgccccagccccgcctccaggactgcaccctccagatgtaattgacaccaatggcttgcactagactttttgctaagggacctgaaaagaacttagaggctggcgtaagttgccaaagccttcccacatcactgagagaatagacttggcaggcttgtgttttgaaaagcagttgggggtgcgctctgtcaaggctcagccatgatgaagaaataatcaaagagcaaaacgtcacttaagtggctaaacatgactggcagcagggttggattccccttcagcatcgaacacctcacaggccatcctctgtgtagacgggctgctttctagtggctccacaggcctggccgtgtcaggggctgcctttattcaaagacttctgttctgtcttaaccaggatcacttaactctctgaaactccagtgataaaaaagcaaaaccggcacaaacatacagctttggaactatctccaaggtcattgttttttcccctgccgcgaatttctttcattcctaattttcctctacctttctttcccttcatcccctacgatagattttgaaccccagggaggttaggactctgtcccgttcttctccctgggctgtccaccctccgacccccaccccacctggcatggcactcaaaggtgcattttcctggggtctgtgcatggaaatcattgcagctgtcagcctgtgtcacgtggggctggctaagtgcggggcaacgcggttgtacatgttgccatggtgacttctctgttgatggcagaaccactgactccagcaagtcacagtattcatttttgcgtcatgctcgtgctacaggaatgctatgagtagcccatgaaaagggaggcgagttgagctcagtgttatcccttgacttgtgtgtctttccttacccccagcgatcccccattcagatgcttcctactgtaccgcatttttgagtattcttcagtatcatgcttctgttacagcaccatatcactcagctatggaagcactcagaggagcacaacaccctctaaattatccgccatcacttcttttacggcctcatttaaaaagacaattgtcagaattcccaggtgtgaattctcacaggggaatctctgtcagtcaccacctggaaatgttagttccacctctgctggccaatcagcacctcatgtccttgctatgatctctacagttgcagaagcattatcctgatgaggtttttaacacatcaccacatgcttttcagagaaaagtccttttataaataccaataactaaacatgataaattgcttcactcctttgagatctttgtctgattccacgtgctctgcatagactattcagaaattctaaagacggatgcagattcctaattctgctgttgagtttgttcctgagagcaacgctgaaagacttttaaaaaattaaaatcagctttatgttgaaatgtaattgtacataaatagccatatgaatgtggggtacagttattttaaacatagaaaataagatgaattgttttggaaattcccctttaaacatgctaaaatgattttcaatcattgacgggaattttaacttttagaaaactggaaaggatacagacaaaagtagtgataacttaaatttgtaaactattttatttgttgaaatgctttaatgcatgattttgttttatcctggaatggccacatgtggtaggcaaagtggacattatcagccacattttaaagataaggaaaatgcagctcagagaaaataaatgtattcattccctcagcaaacactgactgggtggccacagaagtgcggtgcacaaccctggctgcacatcagtcacctggggagcttttcacaaatcccaatgcctgttccccatcccagaggattcctggtgtgcatcaggattgtgaagcaatggggactgagtttatagcaccttactctaaagtatgcagagactagcattatgaagtggaaaatgcatatatttcagattcagttatttttttcccactattccttcctctcaatgaaaattttggagtaaaacatataattccagttctttattctgaactgtcttactattttctatcaccctttaaatataatgcagaagtctggaaggatatgtaatttgcatacctgttggtgaaatccctgctactaaatacactttgctttttcttgttccacattccccttttcgacagggaataaatcatccccaaggctgctagagccaattaaatattttttcacactccgttgacatgaatgagaagaactgtgacagagccacacggctcatgccaggactttatcacgctatctttataatgatgtgagccaggcaccagggaggaatggtgtggggaaccatcaggaagctttaataaccaaggataatttgtttcatcagtttctccttgatggccatttgccatttcacctgtcaggaagcaaaactagttgtcttgtgagatctcaggttaactcaagaagagaacagctcagacaacaatggaagcatatttagcatggagcttttatactcagttctctgaagtcagccttcttggaagaaaatacattgtcttgggattggaattataaatttcccttgtgctaatgcaaccgaaaagagtatttcaaaaccaagagccgaactgggcattcataaaagacttaaaatatgtgtagaattaatttttaaaagcactttaggtttgcccatgccccccttctaaccgcacagtggagacagaatctggtcagctgtctgtggtctgggtgactccaccatgttctcagcaacgctcctcatctatgtattatactagtttctgaaaacttaagaataaaaaggatcaacctcacattttgatgaaatagcagttacaacacaaacatcccatgcctattggcagaactggtccacagagcacagaagcacattcatcgtgtaaagctgaaaacagcgtcttctgcaagttgagataccgaggttccagcagaagataaaaagcatttaaaaatatttaattattcactgaactcctttgaaagacacaggatgacaaagcagatcaataatattcagccatttccaaagggtccatccacagccaaagtatggcctttgaatttactagaaatttccacagagggagagtaaaaggaatcccttcatccttgcttgagtcctaaaataacatgcgcctaagtattctcacaaatgatgaagcgcatctcttgagtagacttaaggtgataaaatgttattttcactgagctcccaagccatacatcatggaagtccaaagcccttactgataattgcataatgcccaggggatgtgtttctctgcagaagtctgaagacaatagatccagggtctcctgaagactttcatcttatgaattgtgcgaatccctgaccactgcctaagaggaaaggtgaaatacatcagagaatgtccttaaaaatatccctttttgacttactataattggttgctttcctcttttaactatcataattttctcagccaccctctccctagaaactggggctatttctatgactcagcaaacaaccaattcttgctaatactgctttgctaataaggaaaccacaagttctcttagctgagactcctgtatagcaggtgtgttcacaaaacttggtgagcacccatatctgagacacagcattccataaagccagaggcagtcaccgaggctgtctgacataccataatatgcccgtatggcttcaggctttccaccctgatctggctgtatcccgcattgcacccatgcagcagcagaaccagcagtaagaatgttttgtcaaaaaacaaatccataaacttcaaaaaaatccacggtacagtatttttaaaaatacgtctagccaggcgcagtggcacgtgcctatagtcccagctacatgagtccaggagttcaagatcagcctgagcaacatagcaagaccctgtctctaaaaagaaaattttaaaatgcatctgttctctctcatatatgcctttaaacgcatccatagcatcaagaacctaaatgccaacatcccaatatttttcctccctgataaacttgctttagagattcaacttgtatttttgctttgaaccaggaaaggtatccaaggtcatactaagataaccatttattaaactctttggctgttttttcctaaactgtaataaactccccctctccaacattcaaaataatagtaaataattctctctgaaattaacacagtgttcctattattgctttcacaacactaaaaagaaatagaactaacggagtcgaactgtggggcattctggcaggcaaatcattaaattcacacaaatgattcggccaagggaaaaaggacaaggttctcagaaggaattatttcagctccctctcagacactgctttaaattaaaacacacacacacacgagcagctgaagacctgagtcaccaatggtctacattaaatttctgcaactgaaagtcaggcaggtattcaagcactctgggagcctgttagaaatacagatgcccaggtcccccacccgagaccaactcaggcagaagcagcatttttaccaaagctcagggcatccgtatgccccttaatgtttgaaaggtctgaatcagagtgctctcccccaaaggcatctcagactgagatagaaattgaagaaaaagcctaaggaggttcagcaactttttcaaggccgaagaacccaccagttacacaagtgcagagccctttgtccctgacattcagagccctgcatgcataggaagtgacagccccttccggggcaccctgctgccgccacgcgcattctggaaactgtgcagcaggagaaacagcgttttccttcagaccggggtttaaatggcacttcccgaatttatattcccctagatttggggcttcttccttcttgcactcctgttaacatcagcatgaattcataaactccctgcagcggaaaggaaaagaagccgcgacaaacctcaacgaagagccgtacggcactgttaaccaagtgctccagtcctgccccagtgtttacaggaaattggttccaggacccccaaagacacccaaatccacagatcctcaagtttctgatagcaaatagtgtggtaaatacctacatataacctacacacaccctcccatatactttaaattgtctcttgtagattacttgtaatacctaatacaacataaatgctatgtaaagagttgttggccaggcacagtggctcacgcctgtaatccaagcactttgggaggctgaggcaagcagatcacgaggtcaggagttcgagaccagcctaaccaacatggtgaaacccaatctctactaaaaatacaaaaattagccgggcatggtggcgcatgcctgtaatttcagctactcaggaggctgaggcaggagaatcacttgaacccaggaagcagaggttgcagtgagctgagattgtgccactacactccagcctgggcgacagagtgagactccgcctcaaaaaaaaaaaaaagatttgttatgctggattgtttagggaacaatgacaagaaaaaaatatctgtacgtgttcagtacagctgaaactttttttcccgaatatttttgatctgagtttggttgaatccacagttggggaacccgtggatgtggagggccagctggatagctgctcctggcagtgaggctctctgatccagactttcaaggttcaccctgagaactacagtaagatacatgagagagtcctgaatgaggagtcgaaagacctcgtcctcgtagcagcgactctggcacccaccaaccatgtggctttcacctaattatcatccattctgcatttttgcctccttaactgtagagaggttgtggaactacagaatctataaaggccagctgtcacaatcaatactttacaagtgcccacaatattttacaataactttgaccattgatttataaacaattataaccaaacattaggactggaacaatttgcccacctgagaaataacaagacatttatctcacatgaaaatggacaccaaataccttaccttcgtgtttattttatgaaatacaaaatctgagcatatattaataatgagctatttttttcttttttcttttttttttgagatggagtcttgctcttttgcccaggctggagtgcagtggcacaatctcggctcactgcaatctccgcttcccgggttcatgctattctcctgcctcagcctcccgagtagctaggactacaggcacccaccaccacacccagctacttttttgtatttttagtagagacggggtttcaccgtgttaaccaggatggtctcgatctcccgacctcatgatctgtctgcctcagcctcccaaagtgctaggattacaggcgtgagccactgtgcccggcctaatgagctattttcaattaaaatacctctttatcgttaatcagacaaaagagtacaatgtcagcctactctgagagcattaagaaatctttttcctgaaaggcaattgagacaattcagaagttaactaagtaactgatggaaagagggagtacaatggaatcaattgcccactcagtcctttcatataaaagttggtttaaacaatcataacatatagccgatgacgacaaatttgtttattctgtttctcttcactcgacctcttttggtcactggatcttggacaatcatgaaagcagctgccactttctcattcctttaagaagctggaaatgtaaagcttgtttaacttttcaagtcaggagccaaaaagtcacaatcaccttcccctgtttgaaattggaaatgctggctggctactttttttttagaaactaggaagtgaagggtagagagagaaatgtgaaactcaggatcatgtcagtacatgccacataatgctctgcctacggaaaaacctgctgacttagagaaatcgctccctcccaaaaatgtgattagcagggatcctctcttaaaataaaacaatgtcccttatatcttcagcatcttagtcgataaccatttgttttcatatctgtttcagaaatatcaatagtgaatggctaaaaacattatttaagaaaaacaatcattttctgctatataactcagatttgaaaacagaataaaatgtaataaaacaaagaagctaagaacaaaggcagagatacctcatctcgcccggacccactgtaaaaataatgttgcaatttaaattaaattataattaatagcagcagttttgttgaagtgtctcaaattattactttagatgctgaaactccagtggtttccatggagatattttctctaggagatgtcagatatgatctaatttttttgtctctgatatatgacaacctgaagcttccagagcctttcattttggggggttttatgttagatatttcaatttatttttatatgcacttcaatatgttttgtttgcaattggtttctgagcctaaatattttgaaacttagtaaataagaaccacaaccaccaaatttatcttctgtagttaaaaaaaaaaaaaaactttactctctccttattcactaggacagacaaacatacttctccttgggtgaggagcatagtagtgcatatgtgtgtgggcgctaaagccttagccaggatgtttactaagtacgttcctgggagaagactctcccatcatcaattcctccagcaatatgtcctgcctggcctgtgcttggtggaggaggggaggagagctaatctctgagtggtgcaatggaaacatggtctacaaatataggaacacggatgactacacacaagggcacgtgcaagggaaatatgcagaaatatgtgggcttttataagactctaaatcagactggaatggcaccatgctttggtggttaacatggagtgtcatttggggatccgcaagagaagtatgttgaatagagtctgtgcttatttgatgaaagactggtcttgagaatgttatagctagtctgttttaaattaacacgccaaatttggacctactcactgtttcccaaagtataggttccttgatactccaacaccactaaaattgttcagctctcccagcaagctgggtgaggggaacgtggatgttagcagtagaataggtgagctttattatccatgtctcagtcatgtttcttggtctccgtttttctctgtgcgcatttccaagaggatgtttgttcccaggggaaaggtcagtggcaataaaatgtatctatcaaaatagcaattgtgttgatcgccagaataaaatggctttgcctcaagggggtaagcactcacatgcattaggacaaccaggcttacagcataaataaatccaggaaaataggagtgctcacactaaacaaacaaaagattttgcccttgaaatgtataaggattcctgacctgaggattttctacaagttattttctaacaataaccaaagtccagcggactaggagtcactaatatattttctatattcaatatgtccatctcctttgttaggaagaataagaaacctgcctcactgtaaggatttagttgagactaggcatctgactttcaaaattctacctgcatagaaggttttgttatcagaagaagctaccgatgtttacatacctcttaatcaactgattttaattatgccagccaatgaacatccatttagcccttgctactgcattgttagtcactggaactgcaaacatgattaagattggtctctgacttgaagaggatgactgtcatgtaagaagtcacaagaattaagattattcccattgagaaaagggacacacagtctgaggtcgctgaggatactttcaggaaagtggtaagatctgatggacaaagaaaaggatagtaaaccagatgtccagacagagtgccatatggcagagaaaaggtgtgtcaactggaggcatcaggaactcctatgagacgggagagttccctagaccccttcactggacttgcaacagggtacagctcactcaaaccttttgcgggacggcgagcacacaggcaagtgggtgccaccgctggggtgaacgcttttggtctccagccccacagcagcatctaggggtatgttacaattaatgctgttttaacagttactgtctggggatggctaagtgttaaccagctcattggagacagggtgacagacttttaccccctgccctcttggtacccaggtccttgtctggcatccaggaagaatcaggtcacacagttttattgagtgatggaggtggctctcagtgggatggggagctggaaagggatgaaatgggaagataattctcttcagtcatcctcagcgaaactgctttccaactgtccagttacctcttcaacattcagatgctgcttctcctcttgatgttcagccgcttgttctcttctctcctctgccacactgctctgctcctctgccagtggagcttggggtttttatggttacaggactggggggcatggcaggccaggctggttttggaaaaagcagcatttgggtgggaaaacagggctgtgaatttctcatttagggctgtgggctcaggtttgtgtgtggaacccttgccagggactccaccctcttctacccagtatttccctgcctcctgtccatatcacctatacctagaatgttgagttggaaaagtgaccccaggaaggaaggggcaggagagaaatccagctcaagggagtctttcttccctatgccaaggagttcagatttacacccaaaacaatcgtggaatatttttaaatgttcctccctagctcttgtcattctccttgcgtcatctcaggtaactccttccactatctccgtatgttctgctactgtttttatccgtaacctcaagggaaccagattaccattgtaattttttttttttttttttttttttttgagacggagtctcgctctgtcgccagggtggagtgcagtggtgcaatctcggctcgctacaacctccgcctcccaggttcaagcggttcaagcaattctcctgcttcagcctcctgagtagctgggactacaggcacgtgccaccatgcacagctaatttttttttttttttttttttttttttttttttgagacagtctcgctctgtcaccaggctggagtgcagtggcacgatctcagctcactgcaacctctgcctcccaggttcaagtgattctcctgcctcagcctcccgagtagctgggactacaggcgcacgccatcatgcccagctaatttttgtatttttagtagagacggggtttcaccatgttggccaggatggtctcgatctcttgacctcatgatccacttgccttggactcaccgtgcctggcctaccattgtaattttttatcactatatttaatatatttcgaaggtacatattatttaaagaaggtcggccgggcgcggtggctcacgcctgtaatcccagcactttaagaggccaagaccggcagatcacgaggtcaggagatcgagaccatcttggataacacggtgaaaccccgtttctactaaaaatacaaaaaattagccgggcatgttggcgggcgcctgtagtcccagctactcgggaggctgaggcaggagaatggcgtgaacccaggaggcagagcttgcagtgagctgagatcgcgccactgcactccaacctgggggacacagcgagactccatctcaaaaaataaagaaagaaagaaggtcatgacggggcaggggataagggaagacaaagaaaaaggaggtcaggaaatttctgcgtttatcaaaaggagacaggaaatatcactcactcacaaagtatccaaatatctagtaaatatctccacctgggtgccccattagcacctccaactcaatatgtccaatacaaaactaattaattcctcatcacctaaaagggctcctcctcccatagtcccaacccaagccaaactgtctgcaagctgggacttcctcaacccttcaactccttgtccctttctagccttcaaaaggcagggtagagaagattgttgactttggaacgaaccctacacctgggttctaattttaactagactattcacaagcttggtgactttctagaaggatatggactaaatagtgtccagagaagagtaattataatgtcaaaaggtctggaaaagatgggcagtaacggtgcaagttttcattcctgaaaaatagcttttggtctttgaagggtggcttatgccagggaattgtatacattcataaccaaatcttcctgtgcttatggtttatgggtagcatgacttatcaggcaatttactgtaaatggacaagttcataactgaaaccacatccatgcttcagtatataatctaaagactatataaaccaaactcttcaaggatgcgtagaataaacagaccatgtcggaccaagaagttctcattagctaaagaactttattctttgtctattttattgttcactgtatatcctcagcacttggaaagaagtctgacatatagtaggcattctataaagatttagtgaataagtaaatgaataaatttgaagagaagattcaggtttaaaaaagaaagccaaggtttttattcaaggtttttattatatgtttttatataaaccagttttattcccacgggataattttaggactaatcttatatctgatgataagcctaataaatgaaagatctttgcattcttgggctgacatttgggattgggaatattaatccacactacctaccccagaaaatcctgaagggaaatgggaaagtgagctgatgagaaagtagctgactacactgtactacatgttggctctccccatttccctgcctagctaactggatttaggattggaccaattggccgggcatggtggctcacacctgtaatcccagcactttgaaaggccaaggtgggaggatcgtttgagcccaggaattcaagaccagcttgggcaacatagggaaaccccatctctacaaaaaataaaaaaatttgccaggtgtgatagtgcatggctgtggtcccagctactcaggagtctgaggcaggaggaacacttgagcctgggaggtccaggctgcagtgagccatgattgtgccactgcactccagcctggtcaacacagcaagaccaaatcttaaaaaaaaaaaaaaaaaaaaaaggattgagccagttaaaacaagcaaaaaccatcagtggtctcttttgcatcccccagttaaagacttggggaatatgaaatccttgaatacccaagagttaagttcactttcatttgtagcttgcttagtgtctgtgcttttactcagtcaactgatagttgagataatttggaatatatatacgtatctatctaaaaagtataattttcctggtcctaaacaagaatatcaagtctggccaggtgcagtggctcatgcctgtaattgcagcattttgggaggccagggtgagtggataacttgagatcaggagtttgagaccaggctggctaacatggtgaaaccctgtctctactaaaaatacaaaaattagccaggcatggtggcaggtgcctgtaatcccagctacttgggaggctgaggcaggagaaacacctgagcctgcaaggcagcagttgcagcaagccaagatcacaccactgcactcactccagcctggacaacagagtgagaccctttccccacactgcccccgccccacacacacacaaaaaaagaatatcaagtctaaaagagaaaggattaaatcacatgtgttgaaagaatctggaatctccctttttggttgccatatttccaagagaagaggaggaaaaagggctctacctgcttttcatcattatcccggataatcttggaagtccatagcccaggaataaattagtgttagaaaacggagtatgtagcaatgttctccctgaatcataacataaacctgtttgcctggtgtgtacacatttcattgtaccaaataagtacttctaaattctttttacatttaactggtgccatccagtagccagagcttgctttagactaaggtgacctgcttctgttggaagatttaccttaacttctccaacagaagaccaacaaatgtgaattgtttctgaagttggattaggtcctatggatgacagaagatagtctgccgacttgcagatggacttcgggatctatttgcctttaccgggcttaaaatttgttttatcttagagaaatacctaaatttaacacaactgattcttacgtttataatagggaaagaaatagaaaattcactaggcagttaatattcttaactgttttgaattattacccccttacaaattcctaaagtgtgccagtgtcttattacagccatgaaaaatacaagtttaaaggaatgattcctttttaaactttttaatactgtagctgtaaaaagctcatctacaaatacattgaatgccaccagttgtgcatggggttaaaagtggatgggaagcagatttcaaccaaatgtaagaaacatattcaaatgcataaactcgtctgtctgtggaactagagcaggccagctcaggtagctctaggattctctaatattgctccaagtgggaagtcgtgtttacctaggccttgtgcaaagagaaacagcaggaacagggatggaggctgttgtgattcttgtgggagacaatggcaagacgggtccatctgaaatggagatttcatttgggaaaacaggaagtgttgaagagttgcatgaagaaataggtatcaaattatttgggatcaatagtatacttgactctgacacttgactctttctttctctacagccagtgcggattttccatataatccaggacaaggccaagctataagaaatggagtcaacagaaactcggctatcattggaggtaggtgatgtctagaggaggcttatatggggctactcaactatggaaagtaatagttgtcaataacatagtagtctaggaaaaaaagttttctaggtttttacattattcattttgctgtttaaagattatgacatatgatgtgaagaaatatagtaaatatagccgggcacagtggctcacctctgttatcctagcactttgggaggccgaggtgggcagatcacctgaggtcaggaattcgagaccagcctagccaacatggcaaaaccccatatctactaaaaatacaaaaattagctgggcgcggtggctcacgcctgtaatcccagcactttgggaggccgaggcgggcggatcacaaggtcaggagatcgagaccatcttggctaacacggtgaaaccccgtctctactaaaaatacaaaaaattagccgggcgcagtggcgggcgcctgtagtcccagctactcaggaggctgaggcaggagaatggcgtgaacctgggaggcggagcttgcagtgagccaagattgtgccactgcaatccggcctgggctaaagagcgggactccgtctcaaaaaaaaaaaaaaaaaagaaagaaagaaagaatatagtaaatgtaacctggctactttttaatgctggcttgtaaaaaacaaatagcagtggaaagctggacagactcagaataattaagtaggtagtagtgaccatagccaggacatttctttatccccctcggatatttttcagtcttatcctttcgcatccaaaatggtccaggatagcgtactataaaaaaatgaaaaggaatgctgggtgcagtgacttacgcctgtaatcccagcacttcgggaggccgaggcaggtggatcatttgaggtcaggagttcaagaccagcctggccaacatggtgaaaccccatctctaaaaatacaaaagttagccaggcgtggtggcgcattcctgtaatcccagctactcgggagcctgagacaagagaattgcttgagcctgggaggtagaggttgcagtgagctgagatcacaccactgtactccagtctaggtgacagattgagacctttctcaaaaaaaaaaaaaaaaaaaaaatacgaaaagggaaatgccagtctgatttcagttatcataataaaaattatcagaaaatcactggaggtcattattttaagtgaaataagctaggcacaaaaagacaaatattgcatattctcactgatacacaggagctaaaagatttacacacatggaggtagaaagaaaaacacgtaacagagattgggaaagttgagcaggaggaggaaggagaatgaagagaagtgggttacagggtgcaaacatacagtaagaaagataaaaggaacaagttccgggtttgctagcagggtaggatgactatatctaacaaaaatgtactgtacttggttgatgaacccctaaatactatgacttgaccactattccttatatacgtgtaacaaattttctcatgtaccccgtaaatttgcacaatgaaaataataaaaactaaaaatgtatcagaagatttaacaagctgtagcatctaaaatattccagtgttttcttctcaccatggacagctacataataatttgactctcctcggatagccactgagcctcatgcgtagatcgatattgacatccctgttaccattaagatcccaatcctcactgtcttttgcttttttaaatgaacttaattgaagtataatacgcatctataagtgtaacaagtccgtaacttttatttattattattttttgagacagagtctcactttctgttgcccaggctggagtgcagtggcgtgatctcagttcactgcaatctctgcctcccgggttcaagcgattctcctgcttcagcctcctgagtagctggaactacaggcacgcatcaccatgcctggctaatttttgtatttttagtagagacaggattgtaccatgttggccaggctggtctccaactcctgacctcaagtgatccactcgcctcagcctcccaaagtgctgggattataggtgtgagccaccgtgcccggccccaatcttttttatagtttgtggttggtttgtcctatctaaaaagtctgcctacccaaaggttttgaagattttcagctttcttctagaagttgtatcactttatcatttgccatcaggtctttaatcacttcgagttaatgtttataaatggtgtgagagaagagtcaacgtcagtattttccaaatgaatatctagtcattccaagaccatttgttgaaaaaaaaaaaactatacttttcctcaattgaattttcttggcacttttgttaaagcaactgacatatgtgtgtgtgtgtgtgtgtgtctattttctgggctttttgttttgttggtctatatatatctttccttagccaatatcatgcttgctttattgttgtatctttttttgttgagatgggagtcttgctttgttgccaggctggagtacagtggcgcgatctcggctcatgcaacctccgactccctggctcaagcgattctcctgcctcaacctcccgagtagctgggattacaggcacgcaccaccatgtccagctaatttttgtattttagtagagacagggtttcaccatgttggccaggatggtctcaatctcctgaccttgtgatccacccacctcggcctgcaaaactggtaggattacaggtgtgagccatcgctcccggcctgttgtatctttatactaagtcttgaaataaacaatgtaagttctctaatcctggccaggcgcggtggcgcacgcctgtaatcccagcactttgagaggccaagacaggttcattagaacatcttaacgatatttagtatttctatctttacatggtgtatctatacgtttatttgtctcatcagtttctctcagcaacgtattgtggttttcaatgcgaagtcttgaacagcttactatttcattaatttcattttctaagtgtctctctctggcatataaaagtataattgatcttttatatcagccttgccttctgtgaccttgctaaatttgctgttagttctaataactttttttgtatattcctcagaattgtctacctagacaagcattttatctgagaataatgagatttttttacttgtttctttccagtctatatccttttgttgtttcattgcaccgggtaggattttcagtacaaaagtgaataaatattgagatttgacaattttgcattgttccctatgttaggggaatgtgtttgatctttcactatgaaataggatattggccgtaggtttccaacagatgtcctttatcagattgagaaagtttcttctactcatagtttactgaaagctgtttgatgaatgggtattggaagttttccaaatgctttttccacatctatttagatgatcatattgttttactccttatttgcttaatgtggtaaatcacattgctttattttttaatgttaaaccaaacttgcattcctaggattaacattatcataatacatgatcttttttacatattgctgggtttgatttgctaaaattctatttaaaagaatattgtggccaggcgtagcagctcacgcctataatcccagcactttgggaggccgaggcaggtggattacctgaggtcaggagttcaggaccagcctagccaacacagtgaaaccccgtctctactaaaaatataaaaatcagctgggcgtactggtgggcgcctgtaagcccagctactcgggaggctgagacaggagaattgcttgaacctgggaggctgaggttacagtaagcccagatcgtgccattgcactccagcctgggcaacaagagtgaaactccgtctcaaaaaaaaaatatatatatatatatatatatatatatatatatatatatatatattgctccatagttttcttgtaacatttttctggttttagtgtcaggataatgctggtctcataaaatgaattgagtagtgttttctcctcctatattttaagaaagatgtgtaggattggtctaatatcattaggtaatgcttgttagtagtattgttcgagtcttttaaatttttgctgattttctgttcaattgttctatcagttactgacagaacagtgttaaaaaatctccaactataattgcaaattggtctaattgtcctaccagttctgcccgtttttgcttcatttattttgtacttaggttagatttatacacattaggaacattatgtcttcctgatgaattcacccttttgtcattatgaaatgttcttcatttctactaacaaccttgtcctttgtctcatattaacgtagctattccagcttatgattattgtttgcatatcttttcccacccttttactgttgacctgtatttaaagttcatgtcttgtagatatcatatagtaggcatcttttttatccactgtctctactttttaattggagtgtttagatcagttatatttacttctgttttatctaatctgtattatttcatccagtatttttttctttttccattttttttttttagacagagtcccccccccccccctcacacaagctggagtgcagtggcacgatcttggctcactgcagcctccgcctcccaggttcaagcgattctcacgcctcagcatcttggctagctgggatcacaggagcgtgccaccatgcctggctgatttttgtacttttagtataaaagaccgggtttcaccatgttgcccaggctggtcttaaactcctgacctcaagtaatccgcccgcctcagcctcccaaagtgctgggattacaggcgcgagccactgctcatttcagacattgtgtgtttcacctctacaagttccacgttgtctcattttttttcccctcattttgatcatgttttcctttaaacccctgtgcaggtttctaatagctattgtactgtcctcatctgctcattccatgctctgtcctttctgtttctaatagctattgtactgtcctcatctgctcattccatgctctgtcctttctggctctccttctaattgactgatgtttcttctggtcaagtgacattttgctacattttttttctctgaattatttttctctgcagcttgacgttatttagatgtgttttaaagctttttcaggacagagctagagtagtctttattctaggcctattttagcaaacaccttcagcatgaccattctatcaactgtattaaatgctctgattgttcaatgaggtctcttcagtgtggttgttggactataaacatctcccagccctccgtgagctctggttttttgcctggcctgtggacttttattctgtacatgcacatgttagtattattcggccacaaattcagagagacttatgtgcagattattagggttctttctatacatagctctctcgcgcgcccactctatctcccctctccattcagggaaaccactgtgctttcttgtgctgcccctccctacactgctgtccaaaaatcgctgccagccagaaaactaggaaaaatgtaggattcctcctttttgtttctctgttctcagacatcatggttcctttctgcctgttttctaatgtctgtagactgtcatttcatagactgtgtccagtattttagttacttttggctggaagacaagttactcctgtttttcctgttactccttcatggacaaaaacagacatcttacttcatttttgttatctttgttgttttggaggttgtgttttatatgggagagggctgtgtctgacggagctgtagtgaagtggggacagtgttggagggactcccaagccctgtctaacctctcgtgcttctcctttctccgtcaggcgtcattgctgtggtgattttcaccatcctgtgcaccctggtcttcctgatccggtacatgttccgccacaagggcacctaccataccaacgaagcaaagggggcggagtcggcagagagcgcggacgccgccatcatgaacaacgaccccaacttcacagagaccattgatgaaagcaaaaaggaatggctcatttgaggggtggctacttggctatgggatagggaggagggaattactagggaggagagaaagggacaaaagcaccctgcttcatactcttgagcacatccttaaaatatcagcacaagttgggggaggcaggcaatggaatataatggaatattcttgagactgatcacaaaaaaaaaaacctttttaatatttctttatagctgagttttcccttctgtatcaaaacaaaataatacaaaaaatgcttttagagtttaagcaatggttgaaatttgtaggtactatctgtcttattttgtgtgtgtttagaggtgttctaaagacccgtggtaacagggcaagttttctacgtttttaagagcccttagaacgtgggtattttttttcttgagaaaagctaatgcacctacagatggcccccaacattctcttccttttgcttctagtcaaccttaatgggctgttacagaaactagttcgtgtttatatactatttcctttgatgtcctataagtcggaaaagaaaggggcaaagagaacctattatttgccagtttttaagcagagctcaatctatgccagctctctggcatctggggttcctgactgataccagcagttgaaggaagagagtgcatggcacctggtgtgtaacgacacaatcagcacaactggagagaggcattaaagaaccagggaaggtagtttgatttttcattgaattctacaagctaatattgttccacgtatgtagtcttagaccaatagctgtaactatcagctgcaataccatggtgaccagctgttacaaaagattttttcctgttttatctgaaacatactggatttatatatgtataagcgcctcaatggggaattagagccagatgttatgatttgtttgctctttttcttttatagtttagttatagcaaaaatatggataatttctagtgaatgcataaattaggttgcgtttcttattttgctttaaatctctggtagtttttccacccctgtgacacaatcctaatagacagtgtcctgtaaatggacacaacacaataaagtcaagttattattgctgttactctggatgatatggaaaacactgccatattttaaatcaactactccacgtgtttttccatccaatcacactgctgtgattcagggatctttcttctaagacggacacatttgaacctcaggttcatcacaaacctggtacctgttgcttcccagaggatggagaagtgtagttaatcacacctcttagtttaatctgaaatcttgacccagttatttaacaaataaatacctcattgattatatttaaaagtaatacacttcctgtaaacaaatggggacaatgcatccaaaaaatctttttaaacagattacacaaaaattatttccagaaaggctaccatttatcatcattatatttcaagcctcttatacttaataagcactttctaaaaagtcttgagatcccaccattctgaggaattcaatatgatcactttttccttctttgcctgggagaggttaagaggaggtttcgaaggtatagatgctattgttctgatggcccggctgaataaaatggaaattctagtttgttagaattatgcattctttttcaagattctcagtgtgcctaacttattggagcacatcagtttcttgggtaatggaaaacattacctagagttgccagtggcacattacaccagtacagagcacattccaaaggagacattggaccagttaattcccatacaagtcaaggtaacagaacaaaagggaatcctgatgcccttttaccattgctggttgagctcaggcactgtcatggacacccttaattttaaaaggttttaatcattcttctataaaatacatttaaaatggaaaaatacttaatatcactaaatatcagaacaatgtaacatttacaaatgacatattgaaagcaaaggctgttttatttagccaagatgattaccattaggagttactttatgtattgttgaaagcaaattttaaacatgatgttttagaagtgtttctgatttttaaacctggtttacaggtattacttctgcacttaccaaataatgccagatggaaatttattatttcttgcaattcccatgatagctctgttctttatgcattgtctcaacactttcccttttttcccaaaatgagtagagaattaaagccacccaaaacagcttctgctactaaaatgttctcatcctttctcctccctctccttttcctgccacaaaaggtgaaaaatgagatccaatcctctcaccaaaatttcaaacctaggacactggaatgactgcagggatcagtggttctcccatatcaccatcaattaagacatataggacactgtcttccttcaagagggttacaatgtggccatcagacaggaaaccaaacggtggataaagtattaagtaactaagtgccaaataaatgctggaaatcttgacctctccttgggattatgggtgtaacaaaaatccctacatctgtttatgaaggccatattcagtacattttaaatggtaaataatctgtttatgtgaagaaaaagaattaagtctttcttccaactctctccttggatagcctagcacagtgcagcctccataaccatgacattcccgcccaagctctcagtgcctaatcctgctttgtcattcacatctcacaaaatcttgacatcttacattccaatacattatcaagcaagcacaagtatgctggtagtagcctctttaaataatatgtatagacaacaacaacgacaaaaaatagactgttttaaagtttcagggaaagttggtggctgatttaaagttgtgcaggaaacatcttctgtgtatgaagcaaatgtcgatgttttgaaaaaagctaggagatgactttgaatgaatgcaaggttagtgagatcctaagctctcaaaatagcatattccctagagctcaagaaagctggtccaggaggttgaaaaagctattttgttgttaaattattttctggcccttcttaatatttaaaaatgtatttccccttgtggctttcaaccacctgctcaaaaaaagagacttgttacatgaaagttttcattaaagagctgaaaacaagaatttagagagccattcctagaaaatgtcctactgccctgcatttgacaaacaagcatcctttactaacaagagcaggaattcagaggcacaagaaaaagcattggcatgagccaaagagtctgtcttaatgttacttttgaaaatctgctgagcggccaccatatgcaggctgagagctgggcacaggcgaagccattggaagcacttcaggaacaagcacacagctgtgggacttgaacatgcaagtgttcaggttgtgtcaagaagcttttctttccttctatgatggaatctgttcttttctatcctacttttttctctcttcctctcctcaccacattataccctgctcttacgcagtaaacgttttaatggcccgtttatgtctcatgcctccaaacaacactgaatttgaaaccccccattttttcttttcaccaccctgttgagcaattttcccaaaaaaagggcagcaattattaaattgaattcaagtaagccagccaaagataggtcctaaattgctagtcccagtagaaccacctgatcctaaaccagtgcgaaacaaacagtaacaatgtccccagctgacttcagctaagaaccaatggctcctacccccgccccgcttttttttgttgttttttgttttgttttgagacggagtcttgctctgtcccccaggctggagtgcactggcgcaatctcgggctcactgcaacctcctcctcctcccacattgaggcgattctcctgcctcagcctcccaagtagctgggattacaggcacccgccatcacacccagctaatttttttttttttttgtattattagtagaagccaggtttcaccatgttggccagggtggtctcgaactcctgacctcaagtgatccgtccacctcggccttgcaaattgctgggattacaggtgtgagccaccgtgccgagccagccccattttttaaatgatgttttggttaagagtggaccatgagaattagctgacagcatcccctttctctctccctgccttggtgggaccctccctgtgtgaccttggtcaagtcctcgaacttttgtcccgtatttaagatggagctgttttacctacttcataagacagttgcgaggtgccattgattcttgactgcaaaataccttgaaacccttatataaagactgaagtcaacggagcctagtgaaagacttactttgtggcttgtggttgaaagtcacatcaaaagacaaatgtggccacgttcaggaattggagacttactggcatggctctacagctgctcagttattaatcatgcagactaacctgtcaacactgggagatgcaacatagcaaaaggacagagaaattagaattttttgtgcagaaagccctaaattcccacctgaatgtaacttacagctcccttacctactctcacacatgccctcaaacatgctagattggcttatacataggccaacacaaaatacaaacgtgacgtgttcatgtagcctagtggctatatgcctattctccatgtaccctgcatggtagtgctgcaaactttaaagtacatttctttcacagcagtattttttttcataagtggcatataaatgtcattcaatgaaatggggaaatcacgttgagaagttggtctgtcatctcccattgagcaaagactggcaggagataataaaaataaatatgggcacacatgtattaatatacagcacgcatttacaagtttattttccagataaaattgtgctataagaacagctctaccaagacagtctgcaccatttccaagtctcagttaatttacagcaactgctgctttcggagatggctgtgaaaatatggaagttcctctcaagtaggccaagaaacagttctagattttactaagttttattttgtcaggttttttaaattttttcagtgagcgtggtgactgcagaggttagtgctgtgaaaagctgggctaaatattctttctgtaaagtcaaacaggattccatcccctgtgaaataacacaaaatttcactctctaaaagcaacagcatgtaaactagaatgaaagaaggaaattatgtacgtatgcctaatattctttgtgaatgtctttcatttaactaaaattatattagaaaccagattgataaataaaaaattcaaagtagttttaattatcctaaaa

SEQ ID NO: 7 - DNA, 14438 bp, Homo sapiens
tagtagggagacacaggaggctgggaggacagtgagaaggctgcctcagtgatcctggagaagggatgaggtctgaactgagataaggggctatggggatgaaggtggaagaataactcaactttttttaaaaattaacatattcctttattcgtttggtcagtatgtgaacctcaaatatatgctaggtgctgaggatatcatgaagaaaacagaattccctgacctcaatgagctcacattctactcggaggggataaaccataaatacgtgtagaatttcagatgctgatgagttgtgctatggaagaaattaaggaagtgaggggaaatttttccagggggtgtggtggtgggaggtgctgaactagtaaagtaggggattgcaggaagccttgctgatgttacagttgagcttcaatatgaaggtgatggagatccatttcggcatcgggaactgaagctgacagaggagatggcaaatgcaaaggtcctgaggcagaactgctgtggatggaacagagttagggaagcaaagaagtggcagctagatgaatcagaaggggaagaggcagatagtgtgcagggccatgtagagccaatgcaagaacttttactctgagatgagaaaccagtggacgggttttgtttctttttgagacagagtcttgctctgttgcctaggctggagtgcagtagcacgatctcagctcactgtagcctctgcctcctggcttcaagcaattgtccagtctcagcctcctcagtagctgggactacaggtacacatcgccacgcctggctaaattttgtaatttttagtagagttggggtttcagcatgttggccaggctggtctccaattcctgacttcaactgattctccagcctcagcctcccaaagtgctgggcttacaggtgtgagtcatcgtgcctggcatttttttttttttttttgagagggagtcttgctctgttgcccaggctggagtgcagtggtgcaatctcggctcactgcaacctctgcctcctgggttcgagtgattctcctgcctcagcctcccaggtatctgggatcacaggcgcccgccaccactcccgggtaacttttgtattttcagtagagacggcgtttcgtcatattggccgggctggtcttgaactcctgaccttaggtgatccacctgccttgacctcccaaagtgctgggattacaggtgtgaaccactgggcccagcctcccctcctccactccgaaggattatttgcttaattattcagtcgtaagatttagttacaggctttgaaaggaggagtaatgaaatctcagttggactcagctaagcaaaaaagggaaaataagtattatctccattttacagatgaggtaatgcctaatgatgacaatatgtgcggccaagctaggattcaagtcaagtttgactccagcagccgtgctcttagtcgtaaccatgaatggacagtggttccctgaactcttcctccagcttggtcccctgtccccaattttcaattactaaatatcccatcaaactggggccagccccacgctcctggccaaacttccaccgaggtgccggcagatggcgatggagccaccgacgggccactctgtctggcgcacgcatctctgtgctgccaggtcgcaggcgccgccgccgccgcacttccgggtgccattgcaggtgagccagggtctcccgagaacctcaccccccggtattcccctcaccctgaagtaagggagtctccctcttcccctcagctcctaaccaaggtgctcagtaccgcggctagggtgcccagcgggaggctgggtagttaccggaggaggcagagccggtcgcacgcctgggtcccagcggaggcccagtcgactctcgacccgggccccagcctccttgcgtggcgaaggtcgtgcctcaggtctcctggcgaacctggccgcccggaagcggagagtgactcctccccttcgtcccctcggtgcccgccaggcggcgccgtcggctgggcccggattcccctgcggcttcgatccctttccactgggtattgagattggcgaggggagaggcgcagaaacggcgtgtaagagagcctgactaccaattggaataagtttccctcctgactgttcacatgtacaggcagcattagcatttcctgcctgtacatgtgaacgttcctatgctctacccctcgaagatcctgattcagtagatctggggtgggacctcatgaaacggcgtctccctctgttgtccagactctagtgcagtggttcaatctcggctcactgcaacctccgcctccccgattcaagcgattctcctgcgtcagcctccccagtagctgagactacaggtgcccgccacccatttttgtatttttagtagggacggggtttcgccattttggccaggctggtctcgaactcctcacctcaggtgatccgcccgcctcggcctcccaaagtgctgggattacaggcgtgagccaccatgcccagcctggaaataggaggagagtaatattgcgaggggttggctgtgaaatggtttatctccaggaaggtttccgggaggaagtgattctagctgggcttgtattcagggaccagaatatccactggttctttgccccacagtaatgaatttacttccccacccctatcaggatgcagaaagcctcagtgttgctcttcctggcctgggtctgcttcctcttctacgctggcattgccctcttcaccagtggcttcctgctcacccgtttggagctcaccaaccatagcagctgccaagagcccccaggccctgggtccctgccatgggggagccaagggaaacctggggcctgctggatggcttcccgattttcgcgggttgtgttggtgctgatagatgctctgcgatttgacttcgcccagccccagcattcacacgtgcctagagagcctcctgtctccctacccttcctgggcaaactaagctccttgcagaggatcctggagattcagccccaccatgcccggctctaccgatctcaggttgaccctcctaccaccaccatgcagcgcctcaaggccctcaccactggctcactgcctacctttattgatgctggtagtaacttcgccagccacgccatagtggaagacaatctcattaagcagctcaccagtgcaggtcagtgtgggccactttgaaggccagaagtaccttggcaaatttcttcaaaatttgaagtcagggagtcagacctttgggtgcccagatgcacacttgattatggtgtagggggacagaggagaagaaagaggccagggccctgctggtagggagctcagtttgggggacagaggagaagaaagaggccagggccctgctggtagggagctcagtttgggagacagaggagaagggatctgggctttgttcctatgaagcttctaatctgaatggagtgtaagttttattcttggagacctctcagtaaaagggagaagggaagaagagaagatgtggatcttggcttgcaagtgtggagaagaaagcagagaaatacaggccctgttcattcactgactgggaagaagcaggatacacccaggaaaaacaactcagtagagatacccagagacagaactaggagagcattttgtaggaaggataagtgtgaggtctgggtggagtacggttatcagggaaagcttcctggtggaaaatgttaggccctgaaggataaggattgctgtatggaattgctgtactttaggttgcatggttgggacttctgatgggtctttaaagggcctcttttcctcttttctcctaaccctgacgtttgctcaggctctgacttctctttcatgtccctgcaggaaggcgtgtagtcttcatgggagatgatacctggaaagaccttttccctggtgctttctccaaagctttcttcttcccatccttcaatgtcagagacctagacacagtggacaatggcatcctggaacacctctaccccaccagtgagcatggggccagagcacttagttctaagactgggagctggggagaactgctttagtccacaaattctgagccacctatgggtgtaacagcctgggcttgtatccctggacatagaggagtgtcaaagcctggctggggttgaggagtgggtcttagtcttctgtgctcagtgttctccccttcacagtggacagtggtgaatgggacgtgctgattgctcacttcctgggtgtggaccactgtggccacaagcatggccctcaccaccctgaaatggccaagaaacttagccagatggaccaggtgatccagtgagtgtggggtattggctgggggagtgggtttgtgtctgagaatctcgaagaagctcttatcttagagcttctttcctggctgaattctgtcttctctaggccttctgctgaagctagaggctccatccatcttgattaactcaatgtgtagctttgggcatcaggatcatggccgaagacatgtctctttgccaaaggtctaggccttactaatggagttatagctggggatgaataggcccctggagaaaaatcttttttctttttgagaaaaatatttatccgtttctactcctgacacatttattggcccccaggggacttgtggagcgtctggagaatgacacactgctggtagtggctggggaccatgggatgaccacaaatggagaccatggaggggacagtgagctggaggtctcagctgctctctttctgtatagccccacagcagtcttccccagcaccccaccagaggtgaggcctgggatgttcctcatctgttctcccagtaatcagcccatgttaccattacagcatcctcatgaatacctctattttaggcccccaaatccatgatcctgggtatcctccactctcatttcttacctaggcccctatgtctgccatcccaaacattgacttcagctttgtgatgaatctgttgaccactgtcattttcctttaggagccagaggtgattcctcaagttagccttgtgcccacgctggccctgctgctgggcctgcccatcccatttgggaatatcggggaagtgatggctgagctattctcagggggtgaggactcccagccccactcctctgctttagcccaagcctcagctctccatctcaatgctcagcaggtaggtaagcgggctgggtttccaggtgacagagctagggtgggcatgaaagaagcataatgaaccactcttttgtcctttgactagtcttagtcccaccttccatacctatccctcttccgttatccctcccttccccgattctggacagagtttgggtccttgacttccaggtacccccttttgtaatacctattcttgcctctgccccaatttatgtctctgacctgttccccttggcctctgaccttttctctgccaggtgtcccgatttcttcatacctactcagctgctactcaggaccttcaagctaaggagcttcatcagctgcagaacctcttctccaaggcctctgctgactaccagtggcttctccagagccccaagggggctgaggcgacactgccgactgtgattgctgagctgcagcagttcctgcggggagctcgggccatgtgcatcgagtcttgggctcgtttctctctggtccgcatggcggggggtactgctctcttggctgcttcctgctttatctgcctgctggcatctcagtgggcaatatccccaggctttccattctgccctctactcctgacacctgtggcctggggcctggttggggccatagcgtatgctggactcctgggaactattgagctgaagctagatctagtgcttctaggggctgtggctgcagtgagctcattcctcccttttctgtggaaagcctgggctggctgggggtccaagaggcccctggcaaccctgtttcccatccctgggcccgtcctgttactcctgctgtttcgcttggctgtgttcttctctgatagttttgttgtagctgaggccagggccacccccttccttttgggctcattcatcctgctcctggttgtccagcttcactgggagggccagctgcttccacctaagctactcacaatgccccgccttggcacttcagccacaacaaaccccccacggcacaatggtgcatatgccctgaggcttggaattgggttgcttttatgtacaaggctagctgggctttttcatcgttgccctgaagagacacctgtttgccactcctctccctggctgagtcctctggcatccatggtgggtggtcgagccaagaatttgtggtatggagcttgtgtggcggcgctggtggccctgttagctgccgtgcgcttgtggcttcgccgctatggtaatctcaagagccccgagccacccatgctctttgtgcgctggggactgcccctaatggcattgggtactgctgcctactgggcattggcgtcgggggcagatgaggctcccccccgtctccgggtcctggtctctggggcatccatggtgctgcctcgggctgtagcagggctggctgcttcagggctcgcgctgctgctctggaagcctgtgacagtgctggtgaaggctggggcaggcgctccaaggaccaggactgtcctcactcccttctcaggcccccccacttctcaagctgacttggattatgtggtccctcaaatctaccgacacatgcaggaggagttccggggccggttagagaggaccaaatctcagggtcccctgactgtggctgcttatcagttggggagtgtctactcagctgctatggtcacagccctcaccctgttggccttcccacttctgctgttgcatgcggagcgcatcagccttgtgttcctgcttctgtttctgcagagcttccttctcctacatctgcttgctgctgggatacccgtcaccacccctggtaaatatctcagctctgattcacttaaagacaatagtgatgtgagttcggcccctcttgttttcaaggaggtgttgctcctcatgttcctgagcttgacagagggtcccatgccccacacaactaggaaggtcttcttggtgtcctctctcttacctgccatagccaagcaaattgatccctcctgttggttcccagggttcatggagaggagagacaaggagtcctctaagactccctgtggaaatgctgcatcctcatgagcacatttcttgattttccagtgatggaagtagtaaattgtgaatatataatggcactgagctgtatgtgtttgagagaaagaaagagattggccatagcaggattcagataagcctgatggcgcttttgtaccacagagagaattagaataacagaatgttgactgtaaggaggttgggctgataggcatttgagtgtgtatgagaattgatactgaagtagtaggagtatatgattgtggagcagtagcctatggattagggaataagaagtgactgtaacgtggcatatcttttcttccaggtccttttactgtgccatggcaggcagtctcggcttgggccctcatggccacacagaccttctactccacaggccaccagcctgtctttccagccatccattggcatgcagccttcgtgggattcccagagggtcatggctcctgtacttggctgcctgctttgctagtgggagccaacacctttgcctcccacctcctctttgcaggtaccccctcctccttcacttgcttccattgtttactctggctttgtggaaagaaaggaaacccctggatttgaatggagagatatgggtttgttggatctttggcaccccttggcctaggctaattggaacctgagccagccagggtggcctgttgattccagccataccctctcttgaggcagtaggttgcccactgctcctgctctggcctttcctgtgtgagagtcaagggctgcggaagagacagcagcccccagggaatgaagctgatgccagagtcagacccgaggaggaagaggagccactgatggagatgcggctccgggatgcgcctcagcacttctatgcagcactgctgcagctgggcctcaagtacctctttatccttggtattcaggtgggtgtaggagagagatcagggagttggtgttttttctctgtgtgtgcatcactttctttcagaccttcaaaaccgtgggagagagccttgactgagtttcacataagtgaagtggttgcccaagcccagtggcctcaaatggcagttctgagacttgaacctgggtctccttaatcctagtcctggatcatttcccctctacaacctagatctggaccccgctagttgcatttgaggattactctatcagtggacagactggaaaaactgaggtgatagccaggattttcttcccaaactgtggtcatggatcctcttcctttcctccagaggcagatgtggcactgatatcttcctccatcctgggggcacagcctgagtgttagcattgcagatggatactgacttgcccaaagtcacatagtgagtcagtgcttggggcagggcaggaagtaggtctcctaactcctagcccaggacatgcaatattttttccactgacatgcactattctcctgcttccattttttacaggggcctatagaaactctccttttgctccgcttcctcctctccttcacaagtaacgtggcccctcctctcctcctctagattctggcctgtgccttggcagcctccatccttcgcaggcatctcatggtctggaaagtgtttgcccctaagtgagtagatttgcttgagaagtagaggtggtggggagggagaaacttggaacaaagtatgaagatcctaaacatccaggatggccaaggttttgcctctacagggaaaaggcagtagacctactctgttgcctgagattctccgcctttctttgcaggttcatatttgaggctgtgggcttcattgtgagcagcgtgggacttctcctgggcatagctttggtgatgagagtggatggtgctgtgagctcctggttcaggcagctatttctggcccagcagaggtagcctagtctgtgattactggcacttggctacagagagtgcttgagaacagtgtagcctggcctgtacaggtactggatgatctgcaagacaggctcagccatactcttactatcatgcagccaggggccgctgacatctaggacttcattattctataattcaggaccacagtggagtatgatccctaactcctgatttggatgcatctgagggacaaggggggcggtctccgaagtggaataaaataggccgggcgtggtgacttgcacctataatcccagcactttgggaggcagaggtgggaggattgcttggtcccaggagttcaagaccagcctgtggaacataacaagaccccgtctctactatttaaaaaaaagtgtaataaaatgataatataattatgtgtgtctgagatgtgggggagccccactgttctataggggttgtgaggaggatcagtctctcctgccaccaggcacagatgagatcagtcatcttaggaaagcctggctgcacctgagaacctttatgaagtggttggagttgtctgaattcactgcctccacctcttcccaaatcaatcctattatcccaccgctattttcctttgccatgcaacacattttgttaagttcctgttctttgtctgataaagagagaagactgagaagacaagcccaggcatcatgcagcaccgactttaactgtctgaagccccaaatagtgctatgcccccgctccactgggccttttcactatagaacaccctttgcccttcccttctgtggaagcctcccttgtttcccaacctgtgccactctttatcagatctacatgcccatcttatgtagcattccaccttgtcccattcattattcctgacttgaagccaaaattgtgtgaatccactggttcttttctcatgtgtatgttttgtgccctctgttcaccccagcactcctgtcatgtttgaaatgctggcatgaaatcctcctagagatgtccatcaaaagagttgggaagaggccctggagagaagcatcaggactgggatttgaggtttgacagtacctagaacaagaggagctgataccactgaaaaacagaacagatgttaaaaccatgggatagcacctacttttagctggcataaagtagagaagctgagtagtagtggttgtgaagtataaacgttcactgctgtggtaggtagctaagggaagaattgaaattatttttattgttactatcattttaaagacatatttttgctctattgtccaggctggagggcagtggtgcaatcatagctccctgtagtttcaaactcctgggctcaagtgatccatctcagcctcctcagtatctgggaccatgcctggctaatttttaaatttctgtacagacagagtcttgctacattgcccaggctgttcgtgaactcctggcctcaagcgatccttccaccttggcctctcaaagcactaggattacaggtgtgagccacagcacctggctaagttcagattattaatggccagtggtccctagtgttacagatgccaaatagtaagatgatgaaaagtatggttcagctgggtgtggtgcctcatgcctgtaatctcagcactttggggagccaaggcgggtggatcacctgaggtcaggagtttgagaccagcctggccaacatggcaaaaccccatctctactaaaaatacaaaaattagccaggtgtggtggtgtgcacctgtaattccggctactcaggaggctgaggcaggagaatcgcttgaacctgggaggcagaggttacagtgagccaagatcacgctactgcactccagcctgggagacagagccagactctctctcaaaaaaaaaaaaaaaaaaaaagggataggttgttaaccatggtagaaagaggtttaataatgcaagggggtgaagttggccccagctggcctgtaagatgaattagaaaaacgcttctccccaagtctggtggacacaactcccaagcatagttcggtgagcaaatggtgtctttttgagaaaggggaaaaaaaccaaaacaaaaacctttcctccatccctagcacccatggaaggattttaggccctagttcctccacttctcagccaggtaccctgcactttttgcagtagcctccttgcctggagcctaaggctaatttgctgatctgccaaccactgtctattctttctcctggtgtatctataagattctattagataaagacattagtacattgatttacgctattaaaaattatttctagccaggcactgtggcatgtccctatagtcccagctacttgggaggcagaggtgggaggatcacttgaggatagcaagactccgtctctacaaaaataaaaaaattagccaggcatggtcccagctatgtagaggctgaggtggatcacttgagcccaggagttagaggctgtagtgcacaatgaatgcacctgtgaatagccactgcactccagcctgggcaacatagatcctctctcttttaaaaagaaaaattatcttatccctcccttttccttgaaatcagagtccattccacactaactcaatgattctttttttttttcctttaattttttgtagaggtgggggtcttgctgtcttgcctaggctggtcttgaactcctggcctcaagccatcctcctgcctcgacctcctcaagtgttgggattgcaggtgtgagccattgcacccagccctgattcttttttaaaaaagctttattgaaatgcaatttaccataaaatttacccatgtaaggtgtaagatttaatggtttttgtgtatttacagaattgtacaaccatcaccagaatcaattttagaacattttcaccaaccccaaaagaaaatctactgtttagatatcaccctccaatcctccccaacccctggctagcactaatctgctgtttctctatatatttgcccattttggatatttcacagaaatgggatcataataatatgtggtcttttgtgactggcatcttccacttagtataatgttttccggtttcatctatatagcagcacacagcagtacttcattctttttcttttttaaaattgaagtaaaattcatataaaattcaccattttaaagtgtataatttagtggccgttagtacattcacaacgttgtacaattatcatcattatcaattccagaatgttttcattaccccaaaaagaaaccctgtacccttaagcagtcattccttctcttctcccccttaactcctggtaccactaatttgttttctgtctctatagatttgcctgttctggacatttcatataaatgggctcatacagtagtgcctttttctgtcttatcttcctttactcagcctaatgttttcagagttcatctatgttgtagcatgtattggtacttcattcctctttatggccaaataatactctattgcatggatataccacattttgtttatccattcatccattgatagccatttggatttacacattttggttattatgtaatgctgctataaacatttgtgtataagtttttgtttggacatatgttttaatttctcttgagtgtatacctagctgtacactgagcaactgctgggtcataaggtaactctgtttaatcttttaaggaactgccagtttgttttccaaagttgctgtatcgttttacagtcttaccagaagtatatatgggtaacgatttctccacatccatgtcaacacttgttgtcatctgtctttgattctaaccatcctagtgggtgtgaagtaatatctcattgtggttttggtgtgcatttccttaatgattaatgatgctgagctgagcatcttttcttgtgcttactggagaaatgtcccttcagattctttgactatttttaattggattattgttattattattatttttggaccagggtcttgctctgtcacccaggctataatgcagtggcgtgatcatggctcactgaagccacagcttcctgggttcaagcagtcctcctgtctcagcttcctgagtaactgggactacaggtgtgcaccaccatggccgactaattttttattttattgtagagacagggccccactatgttgcctaggctggtcttgaactcctgggctcaggcaatcctcctgcttcagcctcccaaagtgctgggattacaggtgtaagccactgtgcctggctagcattctttttacatgctagatacaggtccctgaacagatatatgatatgatatgatatatgatttacaaatgatatatgacttacaaatattttctccactctgtgggttgtcttttcattttcttgataatatcctttaatgcacaaacattcttttttttttttttttttttgagacggagtcttgctctgtcgccaggctggagtacagtggcactatctcggctcactgcaacctccgcctcctgggttcaagtgattctcctgcctcagcctcctgagtagctgggactacaggcgtgcatcaccacgcccagctaatttttgtatttttagtagagacggggtttcaccatgttggacaggatggtctcaatctcttgaccttatgatccgcccgccttggcctcccaaagtgctgggattacaggcatgagccaccgcgcctggcctacacaaaaattcttaattttgagaaagtccagttcatcctgtttttttctttcattgcttatgcttttggtgtcatatgaaataaattattgcaaaatgccacaacttaattttagaacatttctatcatccccccaaaattccctacattgactccctaatcctaccccaggccaatgatctgttttcggtcttttatttatttatttatttatttatttatttatttatttatttatttagagatggagtttcactctgttgcccaggccggagtgcagtggcgtgatctctgctcactgcagcctctgcctcctgggttcaagtggttctcctgcctcagcctcccaagtagctgggactataggcatgtgccaccacgtccggcgagatggggtttcactatgttagccaggctggtctcctgccctctggtgatccgcccacctcagtcccccaaagtgctgggattacaggcatgagcctggcctgttttcaatcttttttttttttttttttttttttttgagacagtcttgctc

SEQ ID NO: 8 - DNA, 12290 bp, Homo sapiens
gcgaggcagccagcgagggagagagcgagcgggcgagccggagcgaggaagggaaagcgcaagagagagcgcacacgcacacacccgccgcgcgcactcgcgcacggacccgcacggggacagctcggaagtcatcagttccatgggcgagatgctgctgctggcgagatgtctgctgctagtcctcgtctcctcgctgctggtatgctcgggactggcgtgcggaccgggcagggggttcgggaagaggaggcaccccaaaaagctgacccctttagcctacaagcagtttatccccaatgtggccgagaagaccctaggcgccagcggaaggtatgaagggaagatctccagaaactccgagcgatttaaggaactcacccccaattacaaccccgacatcatatttaaggatgaagaaaacaccggagcggacaggctgatgactcaggtaggaacccagcgccggggcgtggaatgtgtggctttccagggggttacgagaagccgaacacttccagacttaactctgtttgctcttcgggcagataggaaggtgatttcacccgctccttccccacccacctgcccgccccccatctcttcctcttcctggaggagaatggaggtcaagggtccagctggagaagtttagggtgtggtgggggtgaggacggtaacagacgtggttcattatggccctgatttgatgagtcttgctacaatggccttccccatcctacctctgccctggcttgtaacttggggagaccttcactttgggggcgtcggccctttccaagtcaggagtggaaatggaaggagaggctgggaatccccctcccacaaacatgaagtggtctcctggtactgtacgaacgaacgaacgtagccttgggcattggagctcagagcccccacgtttcccgttgcctctgtggttttctttcccaccactacccccaccctgcacctccccaccaaagaattctcaactggaaaagccaggaggcggttctgacaaaaggcaggggctccaggggagactccgcccgtccctgggtggctggctgtatcgcagagctggctttgcgattgcgtgtccgcaattgtgcccatcagagtgtgaatgtattgatatttctttaaggatgctctttcgttcttccaagcccgaggtaccttaggggagggacttagaacttattggcattgcatcactttagttttcaacctgcttgcataagaattaagagcgaataaatattagtgtggggggaggggaagctaagcaaaatatgaattcctctctctctccccacctcctttgagatttctgagctgccaatctcccagccaattctagactttctgaaactccatgcacgtataactgaagccagaaatgggtttccttgcaaatataggtcaacatcctttttattgccctattaaaatattcaagtcctacctttagggctaggtgcgtacagcggctgatggagtggcgctggtggggcgcaagtgcagggggagggtactgacggcagagagagaggagctacctccgtgccgccctgcttcccgacccgattcccaggcttgcttgaggccgagaaaggcgaggggcaggcaaggtagcctgctccagctgtcggaagggagaggaatgggaaatggtcctgatttccttgctctccctcatctgctcccgaccaccttaaatctggaccgcgagtgtggacgcgcgcgccagtgccagacagcagcgcgatccacaattaactctgcacgggccatggggtgcccgttgcgtgcagctggctggagggagttctccggctagcccgaggcgcccatcctctcgtcaccctcactccccgcggaggaggggccttgccagggtccctcggaacccgagaggagggaggcactgcggagagagcggcgggggcgtggatacccgaggtcccagagccagagtgggtcagcttctgccctgctctgcgggaggccaataccgcagaaggggtcctgggctcgcacaccttcccagggcttgggccttgcagccctgctgcaaagctgcaagcgcacagagccgcgcagcgaggcagacgcctgcagccccacttactcccgggttatcgatcccccgcggctagggtttcagtgcgcgaggggctgggctggagccgccgggctctgctgctccacgcgcgggagcgcaggcaccgcaggagctaacagcagcgccgggctcgctgtagtgtccccggcggcgggggcgcggagatgggggcgcccgcgcaggggccggggcgcatcgcgggctccgccggcctgccctgggacgcgcccccatccccagtccgccgcctgcctggcctctaggcctccgcgtcccagccggagcccccagcccgggggcctccccccgacccccgtccgccctgccgggggacgcagggcccagcggccccgcgcccggccactctcgccgccgcgcgcacaggcagcatttgaacttctgaccttctgtcaacttccctcagacgaacgaaacgaaaacaaatacttttttccttgggcagtggctattcccgttcccaacacaaaaggagggggaaggacggcccaagtgggggttgggtgaggagagccaggccgggattatcaggcagaccccacaaaggtcccctaaaaccgaggggggtaggggctggcagtctgtgaggtatccccggttgatccctcccctaccttccttctcccgattccaggagttaagggtgggggaggaagggatggggaaggcggaggctcgggtgctgagggcaggggcggggtgcaggaggcggcaggggagccccaggccggcgggaggtttggggagcctgctcggccgccctcattttaaataaccacctaggctctgccccaggtgcgtgaccctcttcttctgtctccctccctgtctctgggtctctaatgtgactgccgcccaagtccctcaaccatggcgagatcgtccccagtggaactttcggagcagttccggaacgcaggagctgccggttaatattaacccgggagaggaaagcgcagacagacacgctctccccgcgcgggcctaggtgccaggcgagggtgctggcggccagggggctcctaaggggcaggaggccagagggccggatctgaagcctggagtggggtcccgagccgctacactaaatagatttaatgtgcgctctggggccgccaggaaagacgctcaggtatggggttggggaggggctgttccaccaagcttgggggaaaggacagtggagagaggtgcgtttaggggctggggctgtcttgaagctgggacgcccccgcccccgcgctgggggaagcccaccggctgctggcggtgacactcgccggcgcggctcgcagatcagggaggtaggcgggagctcaggcgtggggaacaacttggcctccgccgacacaaagcccggccccggcggccctgctgggcttcacggtggctgcacagagtcgggcttgattcgcggcacacgacccaatgaattaataaccggcctgggcttcccggctttgcctgcgacaatcccgcccagcgcgggcggaggagaggccgccagccgaggccgcgcggagcccgggccggaggagggcgcaaggggcgggggcgccaactccagcaaccctcggcctccgcccctcactcgcgcagccacctcccgtcgcggcccggctggacccgggtctccctgcccggggtcctccatgcctgcccaagtggcgcagctcacagagctgggggccaggtcatcctcaccctgccgccctctccctggctgccctcctgggaagctgtttaaagcttcttcggcacagccccaggggagggagctgcggtggggtggggggcttgcatgggggtccctgtgcgtgttggtggtgtgcgcctgcgcgcaacgggcctcacatcatagctctacactgaccctggtttactgattgattttcatgtaaaacgcgttcaatcctcaagatgacctcactcaaactctgcccttccgacttttttttttaactgctggcaggcccacaaacatgcaggcactgacctgttaccagggcggcccccagccctaccccacccccagttgttgcatgttgaactctacaaccatattactgggttttattgctgccagatacacaggacttttcctgttgcgcaatttgtcacgtccccttaaagcgccgcagcagtggggccagcgtcctcgccccaccctctcgaaagagtccccccaacccacgctacagttagggccctggatagaagctgtccctccatggcgacaaccagactccaagcagagcatccttccagactggaggaggttagaggtcagccccgccctctgcagaagtcaccttgaaattgcccctcggcctccacttggcgcagcttcttgggggatgccaccatcgtcatctgtgccagttccccctctttaaatcccatgtcccaccagcagcagcagggtaaacatccaggaagcaagtcagtgcccccacaaacacacacagtggattcaactgctttctgtcgcatccttatctgagggtgaccccagaattccaggggaacccccacaatctgaatcccaggtaaccccgtctgcatctgcctagtcagtgtttcctgcctcctcccaggcaacttcctgggaaactccccaggcggaggactccgagacctcaggccttcctgtctcccctccccctcctctcaaacccctccccctccctccacctcttcagtttgctcttcaaacttgctggacgccattctatgctggggccaagaacacaagagcggaggaagggaacaggttaaagaaaacaagaaacacaatcagaccacagaaaagccaggcagaaaagggttcgacgggcaaaaagaatgtggctgtccagataaagaatgtctgtcccggccccggcctgtgctgcaagtggcaactcacctagccgcctgccacccaggctcccgcccaccgcgcagccccgccagcggcttctcgcctcccctctgcctcggatagggttagggcctgaggtaaataaatgcaaggccttcaattctccaagcagtgcgcagtgcatttttctttatttctgggaacttgcgcccaggtctctgtcaggcctgctgtgagggattctacgcggggagaaggtggaggctgcgcaggtggagaaaggggccccagaaggggggctagaagtggagggcaacgtgggggcggggcgggtatcccagagggtgcccctggagggtcctgtagttgatgtcttaaacatgcaggtcacttgtttcagagaaactttatttgcttcttaggcctcgctaggagcatcggctgtttcaggacctggagaaaggcccccagctctaccctgagaggacgtgctcctccacgctcctccgcaaatgctgtccctcttccccagcccagggcccggctcttcggtgtgtctgggccattccaacccccgtctccccacctctccgcatggccctcgcgccttgagactgggcagggcaggctgatggaggggccgggaggggtggcggttgcccaggctaacgtgtccgtcggtgggggtccccttgtcttcgcagaggtgtaaggacaagttgaacgctttggccatctcggtgatgaaccagtggccaggagtgaaactgcgggtgaccgagggctgggacgaagatggccaccactcagaggagtctctgcactacgagggccgcgcagtggacatcaccacgtctgaccgcgaccgcagcaagtacggcatgctggcccgcctggcggtggaggccggcttcgactgggtgtactacgagtccaaggcacatatccactgctcggtgaaagcaggtaagctggccctggccccccggatccgacccaaggaaggccattggcgcacctcggcttgattcaagagaaaaagaaacctggggggaggctgagggccaggagcagggtcgctgggcgatgactgcgtttccgcggtggaacctgccctgtgaggtgccggcccctcgaaatcacccctacctttgaggccacagagcccaaggttctccatgccccgagatggggtcctgtggcttcctgcccgcttctggagcccccactgcagggggtgggaaagcgtgactgggggaggggcgctaggcccttccaggcgagggaagacagccctgcgcggttagccaggtctgggcgagctccttcctctcgtttagggcttaagaaccaaccgcccccacccgctatcccaagcgcaggggtgtctatcctgccccggagcccgcgtcctggctcctccccgccgggcgcccgtggatcctaagctgcctttggggagaggcctggtgggcggcagtaaacccaggggcaaccacctccagcatctggaggcggcgcgcccggagcctgcgttcctactgggagccgggccgggacgccctgggcggcgggcaggccccgaaacgccggcccgagtcggcgcgaggctgtcttctctgggcctgcaacgccacacgctgttgccggcgaggaacagccgtggaggaggcgccatcgcgcgcacgcaaacctccggcccgaggctgtgtgcacagcgctcttctccgcccgcataaattggcacgtttagcaaagccgttcacggtgaatttcggggaaactctgccttcctcaacccccttccaggcttccctacttgtctcctaaattccatgttaatggcactatgttagtaggaaaacactgttaaggtgtcaaggcacacttgtaggtaaaggctagagtggcttctcgtccccacagaaagcaaaggcgtggagcgggggcggcaggggcgggtgtgcggcccggagagctcccggctgcaggcaggcaggaggcggcgcccccacctcgcgggctcggcggcggcccctgggcccagggcgccccctgcgcaaaacctcctccccggctccctgcccgcggggtccccctagcgggggtctccggaggcctcctcccaagtgagcagcgctaatccatcccccggatcgcgccgggagagcggagccgcggcgcgggagccgctcattggcattctgagcacacgggcgggggcgcggggcgcagcgtgtcaagccgggccgtgcgactcgacgactcgggctcgccagcgcccggggtcgcattccggggggctacggagggcctccaacggccagccccgcacttcatgccagagaaaccgatgagaagattaaaagccccctgtaattccagcaggaagattctttctggcaatctctatttgcaaaaagcatgatcccggagattggaatgcaaagaagacggccctccccgccctcctccccggccccctgcgctccgccccaacttcaattattgtcctggggacagtgagcctcagagagcgacagagggctcgagaaagcgggtagtcaaggggccttgagacccggcgcttccagcgctccgaacaggccccgccatttaaaattcaaatacacatcttgagtgcttggaagagaggcctggctgtgcaaatagtgcttgtgaattgcacacggggtgggggggggttgcacctgagcaaatagggagggggaggcccgcgagctggggagagagtgagctgagaacagggaggggagaaaatggaagtgtccccttccaagagtgtctcctgtttatcccagaaatcacaatgacaatgctgggccctttattggattttaattagaaaatccacacaagcctcggattttcacacctcggccaatctctggaatgtttgtccagttgctacaactactgcagctatttttcactccccgcccccgcccctccgcaggcccacgccgaggcgcggcagggtgctgcgggcaggcgggcaggcgggcaggcgggccaggggtttccgccgcgcagcccgggtgctgagtgcgcgagcaggcgccgcgccccgcgccggggcgggagggaaggagggtgcgcccggcgcccgcgggagctcaaggaggcttcctgaggaatccaagtgcagagcaaacaccctctggatggattcgcggcgaggccgggtgtgtgcggagctgggggtggggttggaggaaggcggaaggaaagagtgtcaccggcctctgcaggaaacgccagccaacctctgtgaccgccagcccagacttagagagtcgttaaggaatgtgtcggaatcctgtccctggggcagtggggttgggggagggaggtgtgtgcgggacccgcctggaatcaatcgccccgccccgcgccttgcgcacccctggcctaggagcgcgggcaccaagcgtgcgccctcctccccgagacgcgcctccctctcggaactcaatgccctgtcctctcttctttcccttctcctcacccgcagagaactcggtggcggccaaatcgggaggctgcttcccgggctcggccacggtgcacctggagcagggcggcaccaagctggtgaaggacctgagccccggggaccgcgtgctggcggcggacgaccagggccggctgctctacagcgacttcctcactttcctggaccgcgacgacggcgccaagaaggtcttctacgtgatcgagacgcgggagccgcgcgagcgcctgctgctcaccgccgcgcacctgctctttgtggcgccgcacaacgactcggccaccggggagcccgaggcgtcctcgggctcggggccgccttccgggggcgcactggggcctcgggcgctgttcgccagccgcgtgcgcccgggccagcgcgtgtacgtggtggccgagcgtgacggggaccgccggctcctgcccgccgctgtgcacagcgtgaccctaagcgaggaggccgcgggcgcctacgcgccgctcacggcccagggcaccattctcatcaaccgggtgctggcctcgtgctacgcggtcatcgaggagcacagctgggcgcaccgggccttcgcgcccttccgcctggcgcacgcgctcctggctgcactggcgcccgcgcgcacggaccgcggcggggacagcggcggcggggaccgcgggggcggcggcggcagagtagccctaaccgctccaggtgctgccgacgctccgggtgcgggggccaccgcgggcatccactggtactcgcagctgctctaccaaataggcacctggctcctggacagcgaggccctgcacccgctgggcatggcggtcaagtccagctgaagccggggggccgggggaggggcgcgggagggggcggggcggggcagcaacagcaacgcaaagcaaaaagacactcggaaaaggcgcacgaaccagactgagttataataagaataagaataataaagtaggacagtccaaagtagactctaaggaaacaaggaccccgggaagttttgttgttgtgcttagttgatatatattttttgaatttttttggttattgttttattttggttattttttcctcctctcctggctatttatttgtttggtatgaatagatgttttaaataatatgaaccggaccttcaagagccttaaatagtttgtttcttggataatttattatgatcatgtgaactgtactcacgggggaaagattattttgtgaggccaagcaacctgctcagagtctatttttctacatgtccctcgtcccggctgtcagaaagcaaacctctgtccccgccatccctcccttccatctcctgcttctcagcaagtgcaaactcaaacgtgcttcatgggggtccacaaattatatttttatacacagaattgtaaattagattttttgagagatcaatacttaactgaattacatttcatttttgaaatagtgtaaaatatgaaaatatattattttaatttaactagtttccgatgtaacagccatctcctctgttgtctttatggtttcatattccctttgtattcaccattttgccacattcttggaagccaagactgttacacacacaacatacacacacacttttctttttcttttcttttcttttttttttttttttttttttttggacaaactggaagaactgttatttttaacttcaaagaatttattagaaaataatattttttaaaagcgcacatagtgacgagcccacgaggatggagcctgcagtttgtacagagaaaacaaaggatgtttttgcattaataaattgagaaataacgctgtaaatttactaaaatgtatttttgaatattttgtaatagttttatagaaataaaatgtgccatgcacagaacgcttagtatctaataactaagaattcctgttgcagccctttttcttttagtttttggcttctttgtttgggaaacctagcgctgacaggagctcccaatattctatttagatgtgttgcttatactgtgaactcagactgactgacttaggtaaccaaagtaggcacacaaaccaacttgtttcttctcatggctggagaaacctcagctctgtttgtatttattgtgtgaagctctttctacactcccaaaggttgggagtgccattcgtggggactgtgctgtccccctcaccccaccccttaactagcaaagcctgatgtgtaagcccagaggaggtggcctggggatggccaccaacaaccttctcttaggactcctgtgtgtggttgctgggcagacccctggcctgaccctgtttgtgcttctctgatctgtagggaggaggctcattgctgctttctgaggtcctgttgtgtcccttccagaaagcatccttagaagagaggacccggtttgatcttctctgaagctcctatcctcttttcttgagggtccccttaaatctgagtggcaagcccacagtggcgagggccagtcgctggaatgtcggggctgctgttgaggtcctcaggctacactggttgtctgtgtcacatggcggtcgggcgtggactttgatccctgttgagagagcatgctgctgtgggcgctgggctggggaaggtccttccatgcttcatgctgccttggaggtttggccaagagggtctctgcccttggcggttgtcagggtcccaggtggaggactactcccagttctttggcttacggaaggtgtctgccatgctttgtgctttgggccgaatcgtctgagcaggctgggccttggaagagttgcgctgcatgagcttggggcctcccagcagctgcagcctgtgtagaaggtggtccaggcttagggaacaggagtgaacagacttcagccccacctggcaggggctggctcccgaggttgggcccagtccctgagggtctgctctgctacgggtctgcccttgagtggccttccgtggagggtgtgtgaccaggtggatggcgcagggcctctggagccctctcctcaggagcagtcctcagcctttttctgtaaaagacttttctttggtgttctaggtggtcagcaggttccaggctggtgtttacaatctcggaggaagtgcgatggtttctgttcttttgacagttcagtctgatttcaagtcagtcgaaagcgaaccagaagcaccgggcacagcagctcctctggctgtgtagacagacctggcaatgtggccgtgcagcccagacgatcagagagaagccaggcgttgaccaagccccaaggtgcctgaggccatggtgcaactctgctggtgactggggcaccttggagcagagcttcacccggatgggaaatcctcactcctgggtggcactccctcctggacaggcccggtggcagagtgtccgtgctgctgggtgctgtccccagccctcctggtccatcttcttaagatgcgtccactgctttatatttaaaattctctttttcacaggcaaggaaaggaaaccactgcttagagacactaggtacagggcatcaagagggtgcagcccagccccgccaggacgaggcgccgacttctcattcagggttgacggagccaagagtttgtgcaaaatgtatgcatggtggttgctgccagcctccctcatgactaaatgcatatctattcctgtcaaaacgtgtatcacaatgtacttgaaactgttatctttgtgctctattgtttgaataattaaagaaattacagagac

SEQ ID NO: 9 - DNA, 20727 bp, Homo sapiens
ggccctccgccgccgcgcccgcctacaaggccctgagggagactgcggagggtgagtgcgcggtgggctcggctgaccgttggccctgcggccggcgccctaggctacctcccttcgcctccccgcgcctccccgcgcctccccgcctccccgcctccccgcctcctcggctctggttccaacaccccagcgccaagccggggaggcggggaggacttcttaagtgtgccgctcgggagcctcccgctcgtcccgccccgaggggcgtgaggaggggaggggctgcggacttcggactcgggcctggagaccgcctcctacccagagccggagcccgcaacccgctcaggcggcgacggagccatgtcgccgctgctggggctccggtccgagctgcaggacacctgcacctcgctgggactgatgctgtcggtggtgctgctcatggggctggcccgcgtagtcgcccggcagcagctgcacaggccggtggcccacgccttcgtcctggagtttctagccaccttccagctctgctgctgcacccacgagctgcaactgctgagcgaacagcaccccgcgcaccccacctggacgctgacgctcgtctacttcttctcgcttgtgcatggcctgactctggtgggcacgtccagcaacccgtgcggcgtgatgatgcagatgatgctggggggcatgtcccccgagacgggtgcggtgaggctattggctcagctggttagtgccctgtgcagcaggtactgcacaagcgccttgtggagcttgggtctgacccagtatcacgtcagcgagaggagcttcgcttgcaagaatcccatccgagtcgacttgctcaaagcggtcatcacagaggccgtctgctcctttctcttccacagcgctctgctgcacttccaggaagtccgaaccaagcttcgtatccacctgctggctgcactcatcacctttttggtctatgcaggtttgtcattctcaccaaatacttggcacttccagagcctctatgacatgaggctgtaagttctttactaaaatacatttgaaaccgtctatcccgctatgatgtaaatgctggtatccccgttattctaaccattttgcagcccgttcttaaccagtagggccgacacgtagagccttcatgcagtgctgctttgaacacccagagaaaggagccacctctgtgctgaaactgagatactgtgagatattgccaagggttcagatatcctacaaagggattgttttaatggtagaaaggaaagataacttattaactgcctctttcttcatgccaaggtggtatagatcgtttcggatactcttactgaaaaatgatcctggctttacaaagttcctttcgatttaaagcacaaggcacatgattggttagtataagagcggagggtagaaattttgtagttccattttagtcctataaatgatttaaagtcatttcttatttccttaataattcattttgagttatgaaatttcttatttccttaataattcattttgagttatacatgaacttttaagtgacctattaagaaaaatgtttaaatgataacttgcttcaaattaaagatgctttttaaaatataactcttgagaaatctgttgatttcttttaaaccatttgtttactttgacagatctcagatgcagtgggcaatctagtcctaagtgggaggaggaaatccaaaacacaagtatttaatgatgaaatgtgtcattttaaatgattacaacagaatatctttattgggactacatctaaattataaaagactgtggaggcagaaataacaacaaaggaaatttgtggtaataatcttctgcccattaaaagtgaaacaatgactagaagcaaacttcaagataaggactcctaaacacgtacttgaccttctagggtaaaaatgaaagccttcagccgggcgcggtggctcacgcctgtaatcccagcactttgggagaccgaggtgggtggatcacctgaggtcaggagtttgagaccagcctcgccaacatggtgaaaccccgtctctactaaaaatacaaaaaaaatttagccaggcatggtggtgggcgcctgtaatctcagctactcgggaatctgaggcgggagaattgctggaacccgggaggcggaggttgcagtgagctgagatcgcgccattttactccagcccaggcgacaacagtgagactctgtctcaaaaaaaagaaagaaagcaagccttcccaatcaatttccccttctttaggtctagtaccactttttaagtagacataaatggaaataagtggtatagaagagtgaagggggccgggcacggtggctcacacctgtcatcccaacactttgggaggccaaggcaggtggatcgcttgagcccaggcgttcgagactagcctgggcaacataagagaaatcccatctctccaaaaaatacaaaaattagccgggcgtgctggtgcgcacttgtagtcccaactacttgggaggctaaggtgggaggatcacccaagtccaggaggttgagattgtggtgagctgtgatagtgccactgcactccagcctgggttatagagaccctgtctgtctcaaaagaaaaaaaaaaagaaaaagagaaaaagagtgacaagtacaggcatatttgagggattggtgggtagttgcttatttattgaagttttagattttagctaaagcagaaacatcccctgtatatgaacagaattgtcactgcaaaaagagttatgctatggtttagctctttatttctacaattaaaagcagtaaaaacttaaaaaagaatttttacatcaatagaacattaactacagttggatttttcaatacctatgttcctcttccctctcttgattaacctgaagttgatattctttctgtctacttttaatacatatttatgattccatagataatactgtatatattagccattccctattttatcagtgacaaaaaatttgagagaagagacacagataatacttggagttatagatccagtcatagatataaggaaagttattagaagtatctataaaatatcaacagatcaaaaacactgccctttttttcttgaaatgagggtactaattgatgggggagagggagagtataaagggaacactagagcagtgtttctctctgtattaaaatcacctggggagctctttaaacgtccttgttctgggcccacagattaaaatccaattgctctggcaaggggcctaggcagcggtgtattgtaaagcttcacaggtgatcccattatgaaaccaaggtaaagaagcactgctttaggagtctagacctgcactgtgcaattcagtagccactagctgcatgtggctgtttacacttaaattaactgaaattagattcagagtagccacatttcaagtggtcagttgtcaaattgtgctgtagctagtgggtacaggattggacagtgctagagtctgtttgcatgggtagaacaaaatagacaattgttgattactattagttacagaaatttataatgcagtatgatcttccctttgtttgttttctgccaatataagggagataagaatattcagttgtcagctgttataggccaagcattttgcaaggaaatttatgagagttatcttaattaattcttacaacaacccatcggccgggcgcggtggctcacgcctgtaatcccagcactttgggaggccgaggcgggcagatcacgaggtcaggtgatcgagactatcctggctaacacggtgaaaccccgtctctactaaaaaatacaaaaaaattagccaggcatggtggcgggtgcctgtagtcccagctactggggaggctgaggcaggagaatggcatgaacccgggaggcagagcttgcagtgagccgagatcgagtcattgcactccagcctgggagacagagcgagagagcgagactccgtctcaaaaaaaaacaaaaacaaaaaaaaacaacccatcgatgaatatattcttcccattttaagtaaagtaagtgaggcccagaaaagtgaaatgacttatctaagcttacataactagactgtgttagaactatggttccaactggcactaaagctcatacggattcattatcagcatttccacagtgtgctcctcaaaagttaacaaaactatacacaattgaatatattcagccataaaaaggaatgaagttatgatgtatactacaacatgaatgaacctcaaaaacaatatgccaagcaaaataagccagacacaaaaagacaaatactgtatggctctacatatacaaaatatctagattaggcaacttcatagagacagaaagtagaatagagttaccagggactgtggggaggagggaggaatggggacttattgtttaatgggtacaaagtttctgtttatgttatgaaaacctttggaaatggtgctgctggtgaaacagcatggtgaatgtaacaccaatgacttatacacttaaaaatggctaaaatggcatactttatggtatatatatatttcaccataatttatacaatttttaagttacaaaatgatgttgttgccaaataaatttggcagacactggattaaacaggttttctaattttaagacttcatagagcctttactatgcttctaagtattgtgaaactccaagaggaggatttggagcacagtttttcaaacttacgagatcctcttgtctaggagtgtgtagcagaagagaacatactttgggaaatgctgcactaagtcccatctctcccttttattttctatggctataagtcataactttggaacagagttgttacaaataggactgtcttgggacagttggctaagtcaggcatcattacaagttattatgatatgtcttttttaagcttctaggatactacaagtacagatttgacaaaggtgcaccttgggagatttctttaatcacttgcattttgagggcactgagaagtcaccaatacagggtacatcaaaataacttatgtattttaggattacagaacataagcatccagcaacatagccacaggctcctaaggatagccagtgaccaagtgtctgtgtatttattgatttagcaccccaaattttgatggcacatggagccccagttatgtcattgccatttatcgtgtattaactggctcccctaatcgtgtaaaaaaaaaaaaagctgtgcgatttattaacatattagagctataaactgttaatcagatttcaagcaaatcttccttactttgggttctggaagaatttagttcaatgaacagtttgagagagagctgcattcattttttatgcataattagatattgaaaaacacctgggccgggtgtggtggctcacgcctgtaatctcagcactttgggaggccgaagtgggtggatcacctgaggtcaggagtttgagaccagcctgaccaacatggagaaaccccacctctactaaaaatacaaaattagctgggcatgcttgcgcatgcctgtaatcccagctactcaggaggcagagacaggagaatcgcttgaacctgggaggcagaggttgcagtgagctgaggtcgtgccattgcactccagcctgggcaacaagagcaaaactccatctcaaaaaaagaaaaaaagaaagaaaaacatctgttattttacacgtcagttgtctttattaccacatactgctcatttctttcatagaattttaaattatattgttttctgacacaatgcctgttttcctctaccagatgacaagctttgagtctgtagaccacatttgttttatttgtcataacatatatcaagatcttagcataggacctggtacaaagtaaatgtatttttagaataagtgaacgaactagcaaatagtctgtttactctaaaaaactgtacaggaagaaataatatggccgggcaggatggctcacgcctgtaatcccagcactttgggaggcagaggcaggcggatcacctgaggtcgggagttcgagaccagcctgaccaacatggagaaaccctgtctctactaaaaatacaaaattagctgggtatggtggtgggcacctgtaatcccagctacttgggaggctgaggcaggagaatcgcttgaacccgggaggtggaggtgggaggatcccctgagccctggaggcggaggttgctgtgagccaagatcatgccactgcacttcagcctgagcaacagagcaagactcagtgtcaaaaaaaaaagagagaagggaacatatgttctttttaaataggagctattatcaatttacaaatgaaaaacaccttcaaaggtccaaaatttattttgttatgccagtataatatagtggttaaggccaggtgtagtggttcatgcctataatcccagcactttgggagacggaggcgggcggatcacctgagttcaggagttcaagaccagcctgttgattcataatctgaatcaacatgaccacccacagcctattcattatcgtcactactctactattctttaaccaattcaacgccaacatggtaaagccccatctctcctaaaaatacaaaaatgagcctggcatggtggcgggcgcctgtaatcccagctgcttgggaggctgaggcagtagaattgcttgaacctgggaggcggaggttgcagcgagctgatatcacaccagtgcactccagcctgggcaacagagcgagactatgtctcaattaaaaaaaaaaaatatatatatatatgtaaatatatatgtgtaaatatatgtgtaaatatatatgtgtaaatatatatgtaaatatatatgtaaatatatatatatatatatatatatatgtatgtaatggttaaggccaggtatggtggctcatgtctgtaatcccaggaccgggacgtcaagacaggaggactgcatgaggccagcagtttgagaccagtctgggcaacatagcaagaccctgtctctacaaaaaaattttaaaattagccaggtatggtggtgcacgcctgtagtcttagctacttaagaggctgagacagtaagactgcttgagccctgaagtttgaggctgtattgagccatgatttcatcactgcattccagcctgggtgaaagagtgagatcttgtttcaatttaaaaaaaaaaagactgtgcccttaggctgaatacttattttgggcctcactttcctcatctctaaaatgaagaaatttcataagactagtatgaggaataataattcaagtttgtagcatagtacctgccatacacgaagtacttgggaaataattattatttattattattatttccctctatatttctaacaggcttccagtataatttgatcatttttgcatataatttgatcagttttattgctcacaactccttttgggataaattcaggaaaatgtaagttgtaacttttataacgaaatttgtccattgaaaataagtaaagattttggtacaaatccctaggtgttccccacaacatctgagaacagtctaatgtcattcttccaggtttgtaagaataaccactaatttgaaaacaggccaggcgcagtggctcatgtctgtaatcccagcactttgggaggccaaggtgggcggatcgcttgaggccaggagttcgagaccagcctggccaaaatggcgaaacccagtctctacttaaaatacaaaaattagctgggcatggtggctcgcgcctgtagtctcagctactcaggaagctgaggcatgagaatcgcttgaacccaggaggtggaggttgcagtgagctgagattgcaccactgcactccagcctggatgacagagtgagaatctctcaagaaaagaaaacagctagctagctagcttagttagtaacattagcatatcagcagaatacaaaccagaaatgaaaagtggagtttggagatgcaaactttgaaattatttgcccagtaatgtccgggagtagagattgaatttggggaaaacaagcaggcttgtcattagagaggtattttctttttttcttttttcttttgagatggcgtctcgctctgtcacccaggctggagtgcagtggcgcgatctcggctcactgcaacctccgacccccaggttcaagcgattctcctgcctcagcctcccgagtagctgggatcataggcgcgctgtaatttttgtacttttagtagagatggggtttcaccatcttggccaggctggtcttgaactcctgaccttgtgatccacccaccttggcctcccaaagtgctgggattacaggcgtgagccaccacgtctggcctagagaggtattttcaactcctgacaatgatattttatcagagctcatcagggtatgataacactccttttgctttgcttacgtgctcattaaaatgggttctctggagagggaagacaaatattccagttactagaaagctagcttccactctaaatgaataaatagaccttccagcttctacatgggtgttatgtgatatttaactagtattcttctgtcacagagaattttattccctttaggaatattgagaaactttagtgcctaaaattgccagatttgagacttagcctctggctgtggtaatttcaccaaatccatgctgtcctctgactcttggcagtggactagctggatctcccggttatacctcttcttcaacatgcatgattgtcatctccccttcaaatgtcaataaatagtaacttgttttttgaagccatcttttgatagttccatgcctgatgattctttaaaaaataattcatttttaattacacaatacgtgatatgttctctatgtaaaaaattcaaagactaaagtgccttttgactgccatcctccatgcctccatgcctgtttcctttccttccctgtctactcttccttccacggtaatccttgtctctgatgtttgtgttacaaccttccaaactggttgtttttgttgttgttttttgggtttttcttgagatggagtcttgctctgtcgcccaggctggagcacagtggtgcaatcttggctcactgcaccctctgtctcgcaggttcaaatgattatcctgcctcagcctcctgagtagctgggattaaaggtgtctgccaccacacctggctaattattttttttttgtttgagatggagtttcactcttgttgcccagactggagtgcaatggcacgatctaggctcactgcaacctctgcctcccaggttcaagcgattctcctgcctcagcctcccgagtagctgggattacaggcatgcagcaccacgcctggttaattttgtatttttagtagagacagggtttctccatgttggtcaggctggtcttgaactcccagcctcaggtgatgtgcccgcctcagcctcccaaagtgctgggattacaggcgtgagccaccatgcctggccacacctggctaattttttttttctttttgcccccggagtagctgggattataggcacctgccaccacagccggctaatttttctttattaattatttttttaattatactttaagatctagggtacatgtgcacaacgtgcaggtttgttacataggtatacatgtgccatgttggtttgctgcacccattaactcatgatttacattaggtatttctcctaatactatccctcccccagccccccaccccatgacaggccccacacctggctactttttgtatttttagtaggggtttcaccatgttgcccaggctggtcttgaactgctgacctcaaatgatccaccagcctcggcctcccaaagtgctgggattataggcgtgaggcaccatgcccagccccaaactgtgtttttatttttatttttttgagacagggcttcactctgtcacccaggctggagcgcagtggtgcaatcaaaacctccgcctccccggctcacaagatcctcccacctcagcctcccgagtagctgggaccacaagtacatgccaccatacccaggcaatttttgtattttttgtagagatgggggttttgctatgttgcccaggctagtcttgaactcctggactcaaccaatccgcccatctcagcctcccaaagtgctgggattacaggaatgagccatcaaacccaggcccaaactcttttcatgtgcatttactatacatatagataaaaccctacaggaatgatatattattactgttatttacttatttatttattttgagactgagacttgctctgttgcccaggctggagtacagtggcgtgatcttggctcactgcaacctctgcctcctgggtacaagcagttctcctgcctgagccttccgagtagctgggactacaggtgcacgccaccatgcccagctattttttttttttttttgtattttagtagaggtggggttttaccatgttgcccaggctggttgcgaactcctgagctcaggcgatacacccacctcgccctcctaaagtgctgggattacaggtgtgagccactgcgcccagccaggaatgacatattattatatatattattgtatatgcgtatacttgtgttaacattaaaaagtatcataccttactcagcaggctttattcctgatagccaagagccggaaacaactatctggatgtccttcaaggggcaagtagttaaacaaatagttggggtagttgtggaatgcagagaagtgtttggagatatatattggaggaagaaagggcaagacacagtcacaggtcatttatgacatggaagatacaggatgaggaaacaatttgctttttttggtggtagttgttcaacgatacatcttgtatatctacctatgttagtaaagagatttctctcattatttcaaaacactgcatgatattccaaagtaatagtaaatttgtttagggctgttttcctatgaatggacatttaggtttttcctagttctttgctacaataaccaatcttgtagggccgggtgcggtggctcacgcctgtaatcccagcactttgggaggccgaggcgggcggatcacgaggtcaggagatcgagaccatcccggctaaaacggtgaaaccccgtctctactaaaaatacaaaaaattagccgggcgtggtggcgggcgcctgtagtcccagctactcgggaggctgaggcaggagaatggtgtgaacccgggaggtggagcttgcagtgagccgagatcatgccactgcactccagcctgggcgacagagcgagactccgtctcaaaaaaaaaaaaaaaaaatcttgtatatgtcttctcatacacaaataccagtgtttctctaggacagtaattctgaacttagggacagttttccccccaggggacatttttggttgttacgatgtggggagagggaataggccactgccatctgagtagaggccagggatgctgctaagcatgctgcggtgcacaggacagctcacaacaaagaattatccagtaagacattaaagccaatgccatgtttttagtttttgttaacacagaacccacacctgacatggatttctgtatcagttaactattgctgtgtaacacaccattcaaaacttttttttttttttttttttttgagacaggatctcactctgtcacccaggctggagagcggtggcacaatctcgactcactgcagcctcaacctctgcaggctcagtttattctcctgccttagcctcccaagtagctgggaccacaggcatgtggcaccacaaccagctaatttttgtatttcttatagaaacggggttttgctatgttgcctgagctcattacaaactcctgggctcaagtgatccacccgcttcagccttccaaggtgttaggattacaggcatgagccaccatgcctggccccaaaactgagaataacttatttttcatgattctgtgggttatagatgggcagttcctctgagatctctcatatagctgcattcagctgaccagtggtgaggctggaaagcccaaggtagcctcactcatatgtctggcagttgtcagctgtcatctaagatgcctcagttctcttccgtgtggcctttcatcctccagcaacctagaccagcaaacttacatggtcagggcattcttccaagagagcaaaaagtggaagctgatgggtttattgagatgtgaacctagaattcacacagcatcactcctgttacattcagaattcccatagccctactctgctgcattctatcaacacaagttgcaaagccagctcatttttaagagagggaaagtagacaacgtcttgctgggagaagcagctaccactaagtcacactgatcagaactgctgtgtgaggatgagaagattaggaagtgaagtcgtttgagttttaggatggcataagactgatcagtggtgttcatcttagatctagtggaaaatcttcagtataccatggccttgaatactgaagtaaactaagtgagggtaatgattcagtccatttttatcaatacatgcctaaaagtcacaggtcatttatatcatcataggtcatattacattatattgtaaatgtctgtgtgagtctttatctttctgcccatggtatctagtacacaggaactcaataagtttttgtgtaatcaaactgaaatgactagctgccaaccagacaattctgttcacccttagcagtggcaggtttaacattccaggatttgactgttcaagaatgattccaaaggtctatgatatcatttataattgctgagtcatgaatgtgaatcatgctgtgaggctggtacactagaaaaaactcttagctattgagtgagcttagttcattgctaaatatcttcatctcaacacagcttcattgttctcggcctattcaagtgtgaaatctcagtagtgaaatcttatgaaagggccacttaatttccatgaaaacaggctacaatggtgcatgtcaataataaaacttctgaagatctcaggatctatctctgtggctaagtaaaagaggcagagttgtgtgcctaagcttccacttggaaaaactgctgaaaatgtcactgtctgagggatgctcttaggctggactttgaaaagcgaagacacagctctgtggagtactgctggacaggcatccagcctcctcttccattccgcacttgtgtggccagactatagactcctagccccatgccagagaaataccctgggtgcagagctggaacacaaatcctaaaaagtagccaacagttataatttgtgcttatctctcatgactactcacagtcccttcttaagggctctgttgacaagtaaaaatagaaccaatgataaagctttggtctattggtccattttaccttttcaatacaaagttatgcttgtactcaagaggatcttgggtcattgtatctatttaactgtattttcattttacttttattattattcattcatttaaattgacaaatgttcagggcagccaaatctattttataaaacggtaggaataataatagagcacattaactttcagtgtccattttatagtctataggaaaagcactgggttcaaactttaatgtcctctgtctttttttttatagtaagtggcatattatgatttatgattatagtctaaaatatgccaggtgattctgcaaaggaagatcacagactaagaatacctaaaataaaagtcacatttagtaaccatttatttccagttacaaggaaatggaagataaatcatttgaaatcactctgcttaaaatctgttacaggaggaagtctaacaggagctgtatttaatccagctttggcactttcgctacatttcatgtgttttgatgaagcattccctcagttttttatagtatactggctggctccttctttaggtaagcgtatttttatttaatatgtctgaaagattagggtattttaaaatatgatatgtgtatatcattgtaacatgtcaatttccaaagccacagcaggcacaaaacagaaaatgaaaaaggtagctaacatgcctgaaataatactttgtgtagtatcctttaaaactgttaaaggtagtcagtttcagatatgctatcactttaagaaaccttagatctgagcaccaaaaaagcaacgagtgcttacttcccttcaaaaataatcttttttttttttgctaaagaaatttgttttttcacatttgtgagctccagataaagtatcatttagttcatttgactcattttgcagaacagcatctcatgaaacaatgaatacctgtattaagtatagtttaaaaattatccacattacattcctgttatttttattgtttttgttttgttttttttcgagacagggtctctctttgtcacccaggcttgagggcagcggcatgatcatagccatagctcactgtgcttgaactcctgggcacaagcaatcctcctgccttagcctcctgagtagctgggatgacaggcatgtgccaccacacccggctaatttttgtatattttgtagagatgaggtctcgctatgttgctcaggctacattccagttacttctatttagatcagatatataaactctttataaagatgggtcaaataacacacaaaattatacaatatacaaaaaattattatgcatttcttttgcattacgtatataaagttatcagcatttattgattttgtttagtcatctgttttaagcctgattataactcataactgtaagtgaatatgaagatgcttggccctccattaattcactcttctttttatccagttagcatattgttccttgttagtcattttctttaaaacacacacacacatacacagaaggtaacacagaagggaagtgccataacaggtttgaatagtcaatcacactttactcttcctgtttaccttccattcctctatctcacattaatgttattgttatgctcaatatcatattgttatgctcaatattgttatgctcaataatatctataggcctaaacatgaagaatatcagagaaaaactggttttaaatgctagtaatataacttttggtcagttctacagagtgctagtattttccgataacttctttaaagaaaaattttctctgtttttaggccgggcgcagtggctcacgcctgtaatcccagtactttgggaggccgaggcaggcagatcatgaggtcaggggattgagaccatcctggctaacatggtgaaaccccgtctctactaaaaatacaaaaaattagctggtcgtggtggcgggcacctgtagtcccagctacttgggaggctgaggcaagagaatggtgggaacctaggaggcggagcttgcagtgagctgagatcgcaccactgcactccagcttgggcgacagagcgagactccatctcaaaaaatccgtttttaaattttaaagttaaaaaggtcactaatgtaaagaagttaagaagttaacaaacaaggtcactagttgggcaggcctacaggtagtttttatatgaaaaaattcccccagtatgtctggagactaacatatattaacatgatttatttgttagcgtgctccaactactattgtaacagtaggctaaggcaaaggtccccaaaccccaggctgcagaccagtatagtccgtggcctgttagtaaccaggccgcacagcaggaggtgagtggcaatcaagcttacaaagctccgtctcctgtcagatcagcggtggcattagattctcataggaacgtgaaccttactgtgaactcagcatgtgagcaatctaggttacacactccttatgagaatctaactaatgcctgatgatccaaggtggaacagttccatcccaaaaccatgcccccagtccatggaaaaactgtcttccaggaaaccggtccctggtgctaaaaaggttgaggatctctgtgttaaggaattatttcatccattacttgaaagaacattaaaaagtagccaggtaggctgggtgcggtggctcatgcctgtaatcccagcactttgggaggccgaggtgcgtggatcacctcaagtcaggagtttgagaccagcctggccaactctactaaaaatacaaaaattagctgggtgtgatgatgggtgcctgtaatcccagctactcaggaggctgaggcaggagattcacctgaactcaggaggtggaggttgcagtgagccgagatcgcactactgcactctagcctgggcgacagagcgagtctcaaaaaaaaaaaaaaaaaaaaaaaaaaagcacagtggcacatgcctgtagtcccagctacttgggaggctgagatagaactgcttgaggccaggagttcaaggccaccttgggcaacatagcaaaaccacatctaaaaaataaatttttttaaaaagggtctttatggaagaattttaaaaaggaatctgaagtaatgacaatctctgtaaaaggaccttgattttttcttagaacacattttccagccaaagcagcacttaatgacttcctggaagaacatactagaagaaaagcctcacgatagataaaaaaggaatgctaaatcttctccctttacagagcagaaagtgtgataggttggggaaagtgactatattctcttcatgttagtgtggtacaaacaggaagataacacattatatgtagccaaaacattttaaagaaccacttaccccctaataatccgaacattccccctaaccccgccaaaaaaaagccgaaatctcttacaaatagaagtggaatcaaactttttttggtctggctgtgtcacccaggctggagtgcagtggtgcaatcttggctgcaacctctgcctcgcaggcgcaagcgatcctcctgtcccagcctcccaggtagctgggactactggcgtatgcccccacacccagctaagttttgtattttttatagaaatggggtttctataaaaccacacccagctaagttttgtattttttatagaaacggggtttctatgttgctcaggctggtctcgaactcctgggctcaggtgatctgcccgccttggcctgacaaagtgctgagattataggtgtgagccaccatacttggctgagatcaaacattttcgaattcatatgatactttttatatttagcttgttgaaaatatgtattccaagattctcagttggtctaaggacccctaccttttaaaatagacccaacataaaatatttactgtagttttggtttgaagaggcatgtttctatatttctttctgaggtttatgaatgagaataaaggcatccttcagtatatgtagataaaagacatgtatgtgaataaatgatgatttttagaatactgcattccagccagccattgaattttgtcatatattgaagttaccttcccactggaaaaaaaattggctccaaatgaaataaagacataaagcgacacattatataactctgaaaagaatgggaaaaaataaattataaattaaaagaatcattcaaagagttaagagatgaggagtccaaaataaaaataaaaacaaaaaccccaaaacaaacaccactcaactaccaaagctacattaattaggcagtgccagggtgccaggggagtgagacagaggaaagagtaatcccaaggtatccaccttctttccttcttgaccaagcaggaagcaaactattctttggagtcatagtccatattctttcttgtttctcatcacagcagagataattataattcctctaatggcccctgccatcttaccaaattaaaaatttagaaatgtgactataaggatgtatatgtggcctggtgtagtagtacatgcatgtagtctcagctactcggcaggctgaggtaggagaatcacttgagcccaggaagtcgaggctgcagtgagccgagatcgtaccactgcactccagcttgagtgatgggagtgtgaccctgtctcaaaaaaaaaaaaaaaaagtatatagaattctctagtttatacatttcatacaatgaaaagtagaaaattctatttgcttctatgaaactgcaattctatttttggaaaaagttttaaatgtcttattttctagttctgactttataaaaaatgacaaaaaaatctgtgggtcagttaacatagaggttgtttctgatttttttttttttcatttaaagcctttggttgccaacagactaatctctcacaaatatgttaaggtatctaagtggttgccaaaccttaaggttttttgttgttgcaaacaagagaacataatttcaaatgtgcatgtgacaaaacttgttttcaatctgaatttaaactgatctagggctttaagcctgaatacattcagtttaagatgaaaaattaaccactgcagatttacttttcaggatagtgacttgagcccttggctcactctccttagtccctatttcacattgaaaaattaaccaaaagctacatgccagatttctctgttgtaattctcagaaatgaagattaccaatatgtgaattttcaaaacattttgggccgggtgcagcaacttacgcctgtaatcctagcactttgggaggccaaggggggtggatcatgagttcgagaccagactggccaacatggtgaaaccccatctctactaaaaataaaaaaattagccgagcatggtggcgggcgcctgtaatcccatctactcaggaggctgaggcaggagaatcgcttgaacctggcagggagaggttgcagtgagccaagatcacaccacttcactccagcctgggcgaaagagcaaaactctgtctcaaaaacaaacaaataaacaacaattttgtattatatttcagatttaaacttccaccatcgactgaaattttgtttagatattttatttgcttgacacatctctaaaaccagttaatggtcagttaaataaggttgagataaaaatgaaaaaactgttaatagttgagattaatgaaaaaagagagactggagaaagtaacctaacattgtttttatttgaacattctaagtgaaaactccgagtgctttcagttgctttattctctaggtatgtccctggggcacggaggaaaaggagagtgttaccattttaaagaggagaaaatgaagacccaagtctagaactaaagagccagaactaaaactacatctttggatttagtttatcctttgaattcattgtttagatcctattggttttaccaaatgcatactgtgtttaaggattcacagttgaagaaaaaataatctgagaataatagatttaaatctgatattagatttaaatctgagaatattagatttaaatatctaacatgtttcacgtagaattgatgtagccaattctttaagcatggctttccaaacatctaggtatataattgtaattttaaaatatacccacctagtgattatgaacctccttaaagattgtttttttattttactgtattttgtctttcaggtatattgttgatgattttgatgttcagctttttccttccatggctgcataacaaccatacaattaataaaaaggaataactgttccaaagactcagactaacatacaggacagtccagctggatgtgataaagattttatcacctcatatggaaaacaccggctgcactggattcatcagtgttaacttcctttgaggaagctgccttatagttttcatcactgggactttaaaaaaaaattactgtgaaaatgaggtattctgtacttctcagttaagacttgttctttgagtgatgtattaaatgctgctagaaaagcctcattacattaaatataaatcaatcttaaatgataattgttaactttgatgaaaaacgagtacaggatgagaagggaagtaaaggtgatagtaagatcaacgaatttgtgtatcaagtgtcacccaaatgaacagaatttttaactataaaagtacaaggcgtcaacttacagaactggggagaggatactttcagccaccacctcacaaaatgataccatcaagcagtgtcatctttcaacaggaaagttgcttttagaagtagaatatatattcactcacatgcaagcgatttcctacattttaagtacattaaaatctaatacctaaaatagtttctctaaatagacaatctcactagctccagccaagtggttattctttaatagaatataataaaacaaaacacccatacaaagtcaggatttaagcttttcacattctcctttgaaccaacagctagctaccttatgaagtagggagggcatgtatttttaatctccattttacagataaggaaactaagcctagatgggtttgctgccctggcttagatcacatagagccaaataccatctctagtcttcaacttcaatccaaaaattcttctcggtcacgattatgactaaagggaaatcaagggttcatagaaacattaaatactttataataacgttaaaacttgtttagaaattaactagtattttttgaggtttaaagaaccttccagttttact

SEQ ID NO: 10 - DNA, 4412 bp, Homo sapiens
agaatgctacggaagtccttgacaaaaaggaaacactgagacagatgggctgagaagaagagctgtcgagtccctgattgggaaaggaaaaattaaaaaccctagatctctggtacacataagtctgggtttgcgattgctatttgtgctggggcagtgtgattgagactgacattgaggaaagaagcagctatgaagaccagggggttcagctttccaagacaaaggcaagtcctgtttctttttcttttctggggagtgtccttggcaggttctgggtttggacgttattcggtgactgaggaaacagagaaaggatcctttgtggtcaatctggcaaaggatctgggactagcagagggggagctggctgcaaggggaaccagggtggtttccgatgataacaaacaatacctgctcctggattcacataccgggaatttgctcacaaatgagaaactggaccgagagaagctgtgtggccctaaagagccctgtatgctgtatttccaaattttaatggatgatccctttcagatttaccgggctgagctgagagtcagggatataaatgatcactcgccagtgtttcggcacaaagagatggtcttaaaaatatcagaaaatacagctgaagggacagcatttagactagaaagagcacaggatccagatgaaggtcataacagtatccaaaactacacgatcagctccaactcttttttccatattaaaattagtggcagtgatgaaggcatgatatatccagagctagtgttggacaaagcactggatcgggaggagcaggaagagctcagcttaaccctcacagcgctggatggtgggtctccatccaggtctgggacctccactatacgcattgtggtcttggatgtcaatgacaatgtcccacagtttgcccaggctctgtatgagacccaggctccagaaaacagtccagtagggtcccttattgttaaagtgtctgcaggagatgcagactcaggagtcaatgcagaagtatcctattcattttttgatgcttctgaagatattttaacaacgtttcaaatcaatcctttttctggggaaatctttctcagagaattgcttgattatgagttagtaaattcttacaaaataaatatacaggcaatggacggcggaggcctttctgcaagatgtacagttttgataaaagtattagattccaatgacaatcctcctgaactgatcatatcatcactttccaactctgttgctgaaaactctcctgggatagtattggctgtttttaagattaaagacagagactccggagaaaatggaaagacaatttgctatgttcaagataatctgcctttttttctgaaaccgtctgttgacaatttttacatcctaatgactgaaggtgcactggacagagagagcaaagctgagtacaacatcaccatcaccgtcactgacttggggacacccaggctgaaaaccgagcacagcataaccctgcaggtctccgacgtcaatgacaacgcccccgccttcacccaaacctcctacaccctgttcgtccgggagaacaacagccccgccctgcacatcggcagtgtcagcgccacagacagagactcaggcaccaacgcccaggtcacctactcgctgctgccgccccaggacccacacctgcccctcgcctccctggtctccatcaacgcggacaatggccacctgtttgccctcaggtcgctggactacgaggccctgcaggctttcgacttccgcgtgggcgcctcagaccgcggctccccggctttgagcagcgaggcgctggtgcgcgtactggtgctggacgccaacgacaactcgcccttcgtgctgtacccgctgcagaacggctccgcgccctgcaccgagctggtgccccgggcggccgagccgggctacctggtgaccaaggtggtggcggtggacggcgactcgggccagaacgcctggctgtcgtaccagctgctcaaggccacggagcccgggctgttcggtgtgtgggcgcacaatggggaggtgcgcaccgccaggctgctgagcgagcgcgacgcggccaagcacaggctggtggtgcttgtcaaggacaatggcgagcctcctcgctcggccaccgccacgctgcacgtgctcctggtggacggcttctcccagccctacctgcctctcccggaggcggccccggcccaggcccaggccgacttgctcaccgtctacctggtggtggcgttggcctcggtgtcttcgctcttcctcctctcggtgctcctgttcgtggcggtgcggctgtgcaggaggagcagggcggcctcggtgggtcgctgctcggtgcccgagggtccttttccagggcatctggtggacgtgagcggcaccgggaccctgttccagagctaccagtacgaggtgtgtctgactggaggttcagagaccggcgagttcaagttcttgaagccgattaccccccacctcccgccccataggggtgggaaagaaatagaggaaaattctactctccccaatagctttggatttaattattgaaaggaacccacttaataaagacatttacttctttaatatattcttgttggctaactaaattgtgtatgcccaccacaaagaaggtactattttttgtttgattcatcttcaactttgcgtattatgcttaacttcacaagttaactttttcttattttgtatcctgatgaggcatttcttactagaatcccataagtgaaatataatatttttcaaagttgatatcatttaaaaatttttggtcgttttaaatgtctttattgactttaaattcattgcctctacattattcattagttcttcttttcctaaaactttttacttgttaaaatagtctgctgcatgtaatatgtgcttttactatttgatatttcttctatttttcttttgaaaccggtgttcttattggtttgccatccttgttcattacaactgttttttgtttgtttgtttgttttttggtttgtttgttttttttttttttgagacggagtctcgctctgtcgcccaggctggagtgcagtggcgcgatctcagctcactgcaacctccgcctcccaggttcaagcgattctcctgcctcagcctccagagtatctgggactacagttgcatgtcaccacgttcggctaatttttgtattttcagtagagacgggtttcatcatggtggccaggatggtctatctcttgacctcgtgatccaccccactcagcctcccaaattgctgggatttacaggcatgagccaccgcacccagcctacaataattttcttaaactttaccttttattttaaagttctagtttcccggcattgatagttccctatttgaaatataatgtttctcttgtaagtgatatgataaataaacccctaattagccttagaagaaaaaccactgcaagatattaagcgtgtgtaaatgggctttagtctggaaaccaaaaaaaaaaaaaaaatttagtcattctataggatcatgtgaaaatatttaatttgctccttttaattctgtataaacaaatcagaggttcctgaggttcctgttaaatttttaatggctaatagcccagtgccatccagttgaaaaaacaacagcaatcacaaagtagaggtttatattgtgcggcttttatattcagctattagagtgttattggtagtgtctagccttttcctccacgacattccttgacttaatccatttgggcctattatagacaaaatagagcttctttctagatataaggtctttgaggcagggctcagtggctcattcctgtaatcccagcactttgggaggccaaggcgggcagatcaccttaggtcacgagtttgagaccagcctgaccaacgttaagtaaccccgtctttactaaaaatacaaaattagccaggcatggtggcacatgcttgtaatcccagctactcgggaggctgaggcaggagaatcgcttgaacccaggaggtggaagttgctttgagccgagattgcaccattgtactccagcctgggcaataagagcaaaactccatcaaaataaaataaaataaaatataaaataacttaaaaagaactttgaataaaattctatgaaaaaagacactagaatgctgttcttaattttaatagtgttaagataggtgttagtgtggtctgttctttacctccctttatttggtgcagagaagttagatcctgctaaatttcaattaagaggggaccttaaaataaggatcaatctcttatttaaccctgtaagttactttaaagctaatacaagaaaaacaaagacaagtgaaagtaaggaaacagaaattgc

SEQ ID NO: 11 - DNA, 52962 bp, Homo sapiens
aatagtggatgagctgtgagtgcgcgcgcgtgcgcggggccgcgacctgtgccggctcgagcccgctgggcactcggaggcgcgcacgtcgttccccgccctcccgccgccgcccgccctcgctctctcgcgctaccctcccgccgcccgcggtcctccgtcggttctctcgttagtccacggtctggtcttcagctacccgccttcgtctccgagtttgcgactcgcggaccggcgtccccggcgcgaagaggctggactcggattcgttgcctgaggtgagcggaagggttccctccaggcgccgcggggccccaggcccgccagcccggtactcttccggccggcaggccgccgcaccgccgcggccgcgccccaccggctgctcgtggccgagccgcccctggcccctgacccttgacctgactcccagcccgggccccgcgccccaagcggcgaccccgcccgcgcagtccccggaagcgcgcccggtagtctcctgtgccccttcccccgcccggccgggcctggtggagcccaggctgcccgcctgcccgccctcggtccccggagcttcctctcccagcggcgccgggcagggcgggggctttgggccgggccccgcgaccgcgcagtgtagccggccgctgaaagcgcgcgtggctgtcggagttgaaatgggaaagaaactctttacaactccattttgctttttacgtttaacgagaaacgacaatcactgtttcatattgattaaagtccagttacactttgggtaggttttcttttaatgcagacttgttggagactgtgtaagtaagtaaaagattgtattgaacgcttaggggtatgatctacggccataccacctggaacgcgcccgaactcgtctgaaagctttggggtctgttttgagtggaaaaggggtattttccatttggaaaaaaaaaacaacacacaaaactgtaaatgatttaagcgatgttgcatgaaaatagatgcaatgttgcttagtcgaagtcgctgtattgattaggaatgatctaaatatctgtaccttagttactgattggatctacagttacgggtcgtcttcattgaatagcgctattcgcatccaagttgatttgttcacaaaccttgtttagtagtttacggtggaaaattggaatcctttttacctcaaagttggttccacttgtgttttttaatagttctgattttaaatttttacctctgttgttgacttgtttggttctgtcttgaagaaagtcttaaacgtttcttgcaggtgtgtaagtagatatttcactctgcctttctgaaggagaaaaattgaaaaaccaaaaaacttccataatttaaaatgttgtatgtggagagaatttttcaaccacttagtatcacccagatgtgtaatgtgtaccatgcggatgattgtcaccttagatgtggctagattggcggagatactgttttgagcatttggcacaagtgacattggactgaaaaactagtttttaattgtaaagaatgacttattgaaggatctctggataacttgtcttaattggttccatctacttttgtggagcactgatggctcttggggacattaaatatataaggtgcaccttggtttgagttaaagtctagtgctagatttatcctctctgttctcataaaaatctgtgttggagggaagaagagagtaggaatactgtgtagttcttgagttttagatctaagaggaatctttcaggactggttgtccaaccccatttgcagatgagcaaactgagtcccagagacttaagtaaatttcccaaggttacctatctagtcaggagcagaccagaactgtctgctctgttaaggtattctccatttactcccaagcagttggcctccagagtcagctaaaattcaggacttctagcttattccattgtttcttcttttaaaccttgttgatggtgaatagtttgggagaaactgttcatttgccaaaaaatttcggttcattagcttacacagcactctccccttgttaactggatggtcctgccttcaattgagggagatagatgaatgtacgagggtccctggttggcctaatcatggctttgtttggatttttttttaagggaccaacttctagagcaaggcctacactttactgcttcaaaaccaagatatttaggtcaggctaagatatttttagttaactgtgggcacttttgactgttgatttggggtactgcgtgtatcaagtaaacaattccctgtgcacatgcatgtggtggtggtggagtattttcgtagtcctgatttctttccatttgtcagttaactgctttttaaaagtttattctggtcatatgggggtgtaagttattaggagagtaaaaacaggtagctcttcaggtgtttcttgtccatggggtggagtccatgcagtgactggagaaggtgctagtttgcgtctttttaattgtcttagagagctgagagatatatgttaactctgagaagaaagactgatcagcttctaagagagctaatttgaagctgctggccttctgtagacagcaccttgggtttaattgcattgtggttactagtgattatgataaatagtacatagtcactggattttaaaattggccatatagttgtagttttatatttatttttatttttgaaatggagtctcactctgttgcccaggctggagtgcagtggcgcgatctcagctcactgcaccgtctgcctcctgggttcaagtgattctcctgcctcggcccctggagtagctgggactacaggcacccaccaccattcctggctaacttttgtatttttagtagagatggggtttcaccgtgttggccaggctggtcttgaactcctgacctcaggtgatccgcctgccttggcctcccaaagtgctgggattacaagggtgagccaccacgcccacccatatttgtagttttaaaaggatcctggcagggcgcggtggttcatgcctgtaatcccagcactttgggaggccgaggcgggcggatcacgaggtctggagaccatcctggctaacacggtgaaaccccgtctctactaaaaatacaaaaaaaattagctgggtgtggtggcgggcgcctgtagtcccagctgctctggaggctgaggcaggggaatggcgtgaacccgagaggcggagcttgccgtgagctgagatcgcgccactgtgctccagccagggcaacagagcgagactccgtctcaaaaaaaaaaaaaaaggatcttaagtattttgtctgactctgccatttagtttattcctttgtttacctgcccaatggaactgtttgcttgtaactacacattaatataactaaattttgaacttaatgttacatgccttgctatacatggggctctttggggacatgctcatttgtgggattaaaatttccaagacggtttgaagtttgtaattactataaaatccctcatctttaatctgtggagctgtagtattaagtgaaggccttggtatgttcataattacgatagtcatgtgactgaaaatcaggcactgaagctgctcgttctgggtgttggtctcagtttattgatgcttcatccaaatacatttttatagctaataataaagaaaaacatcaaatactcttgctaaattgcaatcagtatgcagtttatgccaaacttagcttgattttattttttgaagaggatgagtatgtatatttaagcatatgtgtgtgtgtgtatatgtatatatacttgtgtatacgtatatacgtgtatacgtatatatatgtgtacatatacgtgtatacgtatatatatgtgtacatatacgtgtgtgtatgtgtgtgtgtatatatatatatttttttttttttctcttttgagactgagtctcactctgtcgtccgggccagagtgcagtagcgccatctcggctcactgcaaccgccgcctcctagttcaagtgattcttgtgcctcggcctctggagtagttgggagtaccagcatgcgccactgtgctcagctaatttttgtatttttagtagagacggggtttcaccatgttggtcaggctgttctcgaactcctggccttgtgatctgccccccttggcctctgaaagtgttgagattgcaggtgagagccactatgtctggccatatttaagcatatttatgatagtatcttaaatttaagtgaagggaaagaggaaaacatacacagccaatgaagtaagtttgaagtggagtgaaaggaaaagttggaggtaaaaagaggttagagaggtgggcaggggccaaatcatatagggcctttaggacatgggaaattctttggatttgttctgagattagaagtcatttagatattctttagaaagggaatgacatgatctgatattaaaaaaaaaactagaatcactgtgagtaggagtagatctaattccattctgactaaatagtaaactaatatgataatttggacaaatataaaaaggaattcctggctgggagcagtggctgatgcctgtaatcccagcactttggaagtgctgggcaggtggatcacttgaggtcaggagtttgagaccagcctggccacatggtgaaaccctgtctctactaaaaatacaaaacattagctgggcgtggcagcaggcgcctataatcccggctattcaggaggctgagataggagaatcactttaacctgggaggcggaggttgctgtgagcagagatcgagccattgcactccagcctgggagacggtgcaagactcaaaaaaaaaaaaaaaaaaaaaaaaacggaaaggatttcataatattaatttccttgacttagtgacttctgcctattttatttgaagtcattggttcttctcttctcttctcttgagacagggtctcactgtcacccaggctggagtgcagtgagtgatctttgttcacttcaacctttgtttcccaggttcaagcgattctcgtgcctcagtctctagagtagctgggactacaggtgtgtgtgtgtgaccatgcccgactaatttttgtatttttagtaaagacgggatctcaccatgttggccaggatggccttgatctcttgacctcgtgaccccgtgacccacccaccttggcctcccaaggtgttgggattacaagcatgagccactaaggatttgtttttaaaatttttttgctttatttttttcttctctttttttgtactagagatggtgtcttgctatgttgcccagacagatcttgtactcctgggctcaagttgtcctcctgcctcagcctcccaaagtgctgggattaaagatgtgagtcaagcgattctcgtgcctcaacctacccactagctcgattacaggtgccatccaccacctgcccaccacccttggctaatttttgtattttgtattttagtagagacaagaattttaccatgtcggccaggctggtctcaaattcctgacctcaggcaatccacccgcctcagcttcctgctgggattacgggcgtgagctaccctggccaagatttttaatttctgaagcttatagctgctctaaagcacaaggattcagtcccatgatttaaaaaagttgcttgttttgacttcaagtatatggttgagcattctaacttttgttatgtatacatttttattttactgtattcttctagccattgtatcctagtctgtatgttgcagatgagttgtgattctctggtgtctcttccatggacctagagatcatatgctctactactgggatttttttttgtaactttgtttgggatataggctttgagaggttaaggaagtaaatttaagatggatatttaatgttgtaacactttgttaatgcttttttctacaagataattttattatgtgatatggcagctttgttggaaatacctgtttttttgtgtgtgtggaaaatttcttttctggatgaaatctcttgtttaacttttccagttattcataatgaagctctgtttatcttttgaagatcttaagttcagaaacagaaggcaggctgcgtatggtggctcatgccagttatcccagcactttgggaggccgaggtgggtgggtcacctgaggtcaggagttcgaaaccagtctgaccaacatggtgaaaccccatctctactaaaaatacaaaaatcagccgagtgtattagtgagtgcctgtaatcccagctactcggaaggctgaagcaggagaatccctcgaacttgagaggcgcaggttgcagtgagccaagattgctgcactccagcccgggcaacagagcgaaactccgtctcaaacatacacacaaaaaaaagaaggaaagaaaaggcagtagagtatcttatttaagagcatggattctggagagaaactgacagttaaatactagctctgacacttgatggcttgagacccttggcagtagtatgtctcctttgtaattcagtttttttcttctgtagaaagggaatggtaaggaagcgccatgagatttcagtgagagagaagcacttacctcaagtgccagacatgtagcccttcaactaacttattttatttatttattttttgagatggagttttgctcttgttgcccaggctggagtgcaatggcgtgatcccagctcactgcaacctccacctcctggattcaagtgattctcctgcctcagcctccccattagttggggtttacaggcatgtcaccatgcccagctaatttttttttttttttttttttttttgagacacagtctcgctctgtcacccaggctggagtgcagtggcgcgatctcggctcactgcaacctccgccctccgagttcaagcagttctccttcctcagcctcctgagtagctgagactacaggtgcccgccaccacgcccggctaggtgttttttttttttgtatttttagtagagacagggttttaccgtgttagccaggatggtcccgatctcctgacctcaggtgatctgcctgcctccgcctcccaaagtgttgggattataggtgtgagccaccgcgcctggcctactttttttattatttttttttttggagacaagagtctcgctctgtcgcccaggctggagtgcagtggcgtgatctcggctcactgcaaactctgcctcccgggttcatgcggttctcctgccttagcctcccaggtaaactgggactacaggtgcatgctgccacgcctggctaatttttttttttttttgtattttagtagagacggggtttaaccatgttgcccaggctggtctccatctcctgagctcaggcaatctgcctgccttggcctcccaaagtgctaggattacagccgtgagccaccgtgcctggccttctggcctttttttttttttttttttttttttttgagacggagtcttgctctgttgtctaagctggagtgtagtggcacaatctcggctcactgcaatctctgcctaccagggtgcaagcgattctcctgcctcagcctcccaagtagctgggactacaggtgcgtgccaccatgcccggctaattttgtgtgtgtgtgtgtgtgtgtgtgttttactagagacggggttttactttgttggccaggctggtcttgaactcctgaccttgtgatccacctgccttggcttcccaaagtactgggattacgggtgtgagccactgcgcctggcttttttttggagagataaggtcttgttttgtcatctaggctggagtgcagtggcacagtcatagctcatggtggcctccaacttttggtgtcaaggtatccttacgcctcgtcctccctagtagctgggactacaggtgtatgtgccactgcgcccagctaatatttttacattttgtagagatggagtcttgctgtcttgcccaggttgggtctcagactcctgggctcaaacagtcctcccacctcagactcccaaagtgctgcaagtacgggcatgagccactgagtccagctatcttcaactttcactattcaggttacagtttgtagtaccttttttcgggggtggtgggagggtagtgggagtagcaccctaagatttcttggaataaaacagggcttactacttggttcctggtacttaagaacagtggttcctagactccactgttcccaaacttggaatccagttccccaaattggaatcacctgaggtttaattaccttcatggaggtttaatttgcatacaataaaatgcacatactttaaatgatagtttgataatttttttgttcttattttttttagacatagggccttgttctgtcacccagctgaagtgcagtgtcggaatcatggcttactacatcctcgacctcctaggcccaagaattctctgctttagcctcccgagtagctgggactgcaggtgtgcaccaccacgcctggctacatttttattttgtaatttttttttttgtagagagaggggtctcactatgtgctcagactggtcttgaactcctggccttaagtgattctctcgtctcaacctcacaaagccctgggattataggcatgagccaccacaaaccgccagtttgataaattttgatgaatgtgtatacccaagtaattgccactcagtcgagttaaagagcatttcctcaaggctttaaatttttatttttatttttgagacggagtcttattctgtcatctaggagtgcagtgccgcaatcttggctcactgcagcctctgcctcccgggttcaagtgattcccctgcctcagcctcctgagtagctgggactacaggtgcgtgccaccacacccagctaactttttgtatttttagtagagatggggtttcactctgttagccaggatggtctcgatctgatcttgtgatccgcctgcctctgcttcccaaagtgttgggattacaggcgtgagccaccgcgctcggcgggtttctttttttttttttttatgagatggaatctcgctctgttgcccaggctgcagtgcagtggcacgatctcaactcactgcaacctccgcctctcgggttcaagcgattcttctgcttcagcctcccgagtagctggaactacaggcacccgccaccacgcccggctaattttttgtgtttttagtggatacggggtttcgccatgttggccaggctggtctcaaaggcctgaccttgtgatcctcctgcctcggtctcccaaagtgctggaattacaggtgtgagccactgctcctggcctaaagttttttagactagtttttttgttcattcgttttatttgcttggcttcctagaatatgacaagttttggtttgtttttgagacagagtcttgatctgtttcccaggctggagtgcagtggtgctatcgtggctcactgcagcctctaactcttgtgcccaagtaatactcctgcctcagcctcatgagcatctgggactacaggcaagcaccaccatacctagttaattaatttaatttttatagagatgacgttttgccatgttgtccaggctggtctctaactcctgagctctggcctcgcaaagtggtgggattataggtgtgaaccactgcacccggcctagttttttattttaagaaatatatatacttggtaaaagtaaactcctgcaataaggtttacaataagcatatataaattcttagccagctcactgggaggtacctaatggttcatttttctttgtcagttttactagatacgcattgtcttagaggcaatgtaagtttggaattaggccaaacaaagtcaaatcctgattctgtgcatccattgaaggttaaccttataatatttacattttgagataaatgatttcatgctcttatttaggaaacttgacggtatgttacctcagggattgttccttgcctgtctttccccaaagaacttgagtttgaagtgattttcacttggcagtaaattgaaggttttcttcattgcttaccaccatgtgccttattcctgctgctcttgatctccaagtgcccttactgctacagaaaggaaagctcttgaactaagagcttggcagccacttgatcaggatggccaaataatggcagtacaggttgagcatctgaaatgcttcaagatgggcgctggcatgacattcaaaggaaatgcctagtggtgcctttcagactttcaatttttggatttgggatactgaaccagtaagtataatgcagatattccaaaatctgaagaaattctgaaatctgaaacacttctgggcccaagcattttggataagcagtactcaacctataccaggctcaagttcattatggacagatggatggatggtagtttggccctttcatcaggaatttcccatgcagtcagtaaacaaaataaacagctctatgttttcaacttcatttccccaattttttttttttttttttgagacagagtttcattcttgtcgcccaggctggagtgcagtggcccgatctccactcactgcaacctttgcctcccagaggtttcgccatgttgcccaggctggtgtcaaactcttgggctcaagtgatccatccgccatggcctcccaaagtgctgggattataggcataagctaccttgcctgtccgttttcatatttttttgagagatgaggtctcactgtattgcccagactggtctccacctcttggcttcaagcagtcctcctgcctcccaaagtgctgggattgcagttgtgagccaccacacctggtcaggagttttacatactatgcgttgttacttgtaggtcttgtttggaaagaagtaacttcctaaggtcaattcagaaaagaagggtagtaacttagaggaagtaaatttgaaggccctagtgtctaatattagtaatttgggcttttgaaagtttcctttctaaaaggtaggaaattaactcttttttttttttttttttttgagacggagtctctgtcgcccaggctggagtgcagtggtgcaatctcagctcactgcaagttctgcctcccgggttcacgccattctcctgcctcagcctcccgaatagctgggactacaggcgcccgccactatgcccggctaatttttttgtatttttagtagagacgggatttcaccgtgttagccaggatggtcttgatctcctgacctcgtgatccgcccgcctcggcctcccaaagtgctggaattacaggcgtgagccaccgtgcccggctggaaattaacccttttatataccatccccccacctcacctttttggctacaatcttgctctgtcacccaggctggagtgcagtggcatgatcatagctcactgcagccttgaactcctgggctcaagggatccagctacctcagcctcctgagtagctaggattacagacgcatggcaccaagtcctgatacagtcttctctgtaccagaacaaagtattcagtgattcaagctcacataggcatgaaacagcactgaaagacgaagtgctgtaggagttcagggataaagaagaatttagagtagccaggaagccactgaggcctctggtggtgagggtgtaactcttggcctttaaaatgaggtttaggggaaatgttatgagtagtgggaatcaacccttggcctgaacacagataatcttgttttatctccttatagaaacaggaggtggtggggggtggccagttttggttagactagggaagatgttgggggagaggggggcagtatgcttctgtagtttcgttttttttgtttttttttttttttgagatggagtctcgctctgtcacccaggctggagtgcagtggcgcggtctcggctcactgcaagctccgcctcccgggttcaagcgattctcctgcctcagcctcccgagtagctgggattacaagcacgtgccaccatgcccagctaatttttttgtatttttagtagagacgggtttcaccttgttggtcaggctggtctcgaactcctgattcgcccacctcggcctcccaacgtgctgggattacaggcgtgagccaccgtgcccagccgtttctgtagtttcttgagttcagattccaagatggatttttgcatatgtattgctttatttcttacccccttgatgtaatctactatataaatcttttaaagtccctacatttaaaaatttatcttgttcgaaaacataatagttttatttggtaaattcaaacagtgcaaaaggatatatggcccctagaggtacctgttgtgtttcttgtagaccagtgcatgtaatcccagcacttggggcagctgaggggagcccaggagttctaggccgcagtgagtcatgatcactccactgcactccagcactgcagcctgagtgacaaagcaagaccctttctgggggaaaaaaaaaaaaaagctcctgtgtactattctagagacagtctatacatataccagtgtctattggtgaatattgtacacctctgtcaagccctgttttgtatatctatgtatcccgccattacactatggtatgatagcatatgacatatttggcacatcacttttttcatttaataatcttgtctcagagatcatttgttaacacactttttttttttttgagacagagtctcgctctgtcgcccaggctgcagtgcagtggtgcgatctcggctcactgcaagctccgcctcccaggttcacgtcattctcttgcctcagcctcccgagtagctgggactacaggtgcccgccgccacgcccagctaagtttttgtagtttttagtagagacggggtttcactgtgtcagccagggtggtcttgatctcctgacctcgtgatctgcctgcctcggcctcccagagtgctgggattacaggcatgagccaccgtgcccagcctttttttttttttttttttttttttttttttttgagacggagtcttgctctgtcacgcaggctggagtgcagtggcacagtctcagctaactgcaacctctgcctcccgaggcagcaattctcctgtctcagtctcccaaataactgggattacaggcgtgagccaccagtattaaagccctgtaataatactgtaatactcagacagcaaaattcttttttttttttttttttttttttttttttttgagacggagtctcgctgtgtcgctcaggctggagtgcagtggcataatctcggctcactgcaagctctgcctcccgggttcacgccgttctcctgcctcagcctccagagtagctaggactacaggtgcccgccaccacgaccagctaattttttgtatttctttttttttttcttttagtagagacggggtttcatggtgttttagccaggatggtctcgatctcctgacctcgtgatccacccgccttggcctcccaaagtgctgggattacaggcgtgagccaccgcgccctgccagcaaaattctttaagcccccactggggcttaacatctattgatgctactgcctaccctttcactgctccttacctttagtttatcactgtaattacccccttttatgtattctccatttcttgttctgtctctcattttatgttacctggcaaaatctcagccctggtttagatcttactttttttttttgacaaagtcttgctctgttacccagggtggagtgcagtggtgcgatctcaaggctcacagcaacctccgccttctgggttcaagcaattctcgtgtctcagcctcctgagtagatgggaccacaggagcgcgccaccacacttggctactttagtagagatggggtttcaccgtgttggccggggtggtctcaaactcctgacctcaagtgatctgcccacctcagcctcccaaagtgctgggactataggtgtgagccaccacgcctagcctaaatcctactctttacctattctgtgcttttgactgaatgtagcgaaagaaaaaattcactgacttgtctctctttgaactcatggacccttgacctcaaaggtggctgcttttagcactgcctagcagtcccgctaagattccttagtccgtttattctcctgcttttaggataatatagcaccatgtcctttggctcaaatctcctgttccctttccttgcctctatcagctgttatgatcttgcttcttacttatttttctattcctgtggatcagtcccttgggagtccattgttctatctaaggtcagcccttccacttgcaagcgaaatctcgttcccctctaatctcgtaatgttgctctagcagttctctgctctcctgcatcatcattttctgcatacagtctgttggtcagatcttaataccccacctagctgcagtgaatgctgggaaatgtagtctttataactggcagccatgtgactatgaaggggaaagctattgaggcagataagcaggcagtctctgccatactttcaacgcttattttttttaaaaaaacaaaaaccaactcttttggtaacaattttactgagatataattcatatatcacaccattcatttgaaatgaacagtttggtgggttttagtatattcacagagttttacgtgtatcactacagtcaattttagaacattattatcacctcaaaaagaaaccctatgttcttcaactgtcatcttcaatctccctatcaccacgcccagccttaggtaaccactaatctactttgtgtctctatagatttgcctattctggatatttcgtgtaatggaatcatatattgtcttttgtgactggcttctttcatttatgcaatgttttaaaggttcatccatgttgtaacatttattttctgactttttttttttttttttttgagacaggattttgctctgtcacccaggctggagtgcagtgtctcgatcactactcactgccactttgccctcctgggcccaagcgatcctgccacctcagcctgcagagtaggtgggaccacaggtatatgctaccacgcctgggtaatatttttattttttgtagagacaagctctcaccatgttgaccaggccagtcttgaactcctgggctcaagtgatcctcccacctcagcctcccaaagtgctgggattataggcatgagccaccaagcccaggctgactactttaaaaaaattttttttagtaaagatgtggtctcactatgttgcccgggctggtgttgaactcgtgcttaagcagttctcccacctcagcctcccagagtgctgataactgcacccggcctgactttttttgtgtgtgatgttttgctcttgttgcccagtctggagagcagtggtacgattttggctcactgacacctccacctcccaggttcaagcgattctcctgcctcagcctcccgagtagctgggattacagacgtgtgccatcatgtccggctaatttttgtatttttagtagaggtaaggtttcactatgttggccaggctggtctcgaactgctgacctcgtgatccgcccaccttggcttccaaagtactgggattacaggtgcgagccaccgcgcccaactaattttttgtatttttagtagagtcagggtctcaccatgttggccaggctggtctctaactcctgatctcaaatgatccatcctcctcagcctcccaaagtgctgggattacaggcgtgagccaccaggcctggccccgggctgacttcttgaaagaacattttccaccacatatctcagtgcccacgttttctcaattcactgccatctactcttgcctgtggctatatgaaaaggttttctcctgttgctggacacctcctcatagacctgtgttctttttgcaagcatgtagtttggactcttttcttgtaatgtgttcttccttttttcttggtgttcattatcatcatacctttttgagcatttcagttatttctggcttcttcatgaccaccacttcctttgtgttggtggcactctttggctagatcactgcccctctccattccatacactggaagactatgctgtttttacctgtaataacagcttacctgggcactgatatttttcagctgactgtggggaaatgtttgtgaggtttggaaaacgcctccttagattgtgcccattccacctccccttccattagggttctttcttttgggcaccctcatacccttgccatagttttctcatccctatccagttaaccactcaatcacttttcgtgccctgccaaggctctgtttcttcctcttctttttttttggagacagagtctcgctctgttgcccaggctagagtgcagtggtgtgatcttggctcactgcaacctccgcctcctgggttcaagcgattctcctacctcagcctcccgagtagctgaaattataggcgcccaccaccacgcctggctaatttttgtatttttagtagagatggggtttcaccatgttggctaggctggtcttgaactcctgacctcaggtgatctgcacccctctcagtctcccaaagtgccgggattacaggtgtgaacagccgtgcccggccaggctttgtttctctattaattacagacctgattgtgctggtccagtggctttcccttccttacagaatagaatgcagattgctctgcatgacataccatatcctctggtctaaccatcgccccatctttccacccttattttcaaaaatctcctttctgaattctttttttttttttgagacggagtcttgcactgtcgtccaggctggagtgccgtggtgcgatctcggctcactgcaagctccgcctcccgggttcacgtcattctcctgcctcagcctcccgagtagctgggactacaggtgcctgccaccacacccggctgtttttttttgtatttttagtagagacatgatttcaccgtgttagccaagatggtctcgatctcctgacctcgtgatctgcccgcctcggcctcccaaagtgctgggattacaagcgtgagccaccgcgcccgaccgccaaattcttgtgttactggtcattgaggttatttgctcaagctgtttcctcaccttagaaagtattcctgaaccatcgttaccgctctttccaggggacttgtcctccttcttcaaggtccatccaggtcagatatcatcttatctgaagctctctggcagaatcacttgccttttctctgagttcataccagagaagataagcttttgttacagcacttaattacattgtgctgttttccctgagtgttttccagataaagctgtatctctagtagctagaacaaggaatggcccatagaagacagtggtttgtggccggatgcagtggctcacgcctgaaatcccagcattttgggaggccgaggcaggtagatcacttgaggtgaagagtttgagaccagtttggccaatatggtcaaaccccatctctactaaaattacaaaaattagctgggcatggttgtgcgcacctgtaattctagttactcatgaggctgatgcaggagaattggtggaacccgggaggtggaggttgcattgagccaagatcatgccactgcacttcagcctgggcaacagagagagactctatctcagaaaaacaaaaacaaaaaagtggtttgtatgagaccagtcggggcaataagaattgagacaaggagctggatgcagtggctcacgcctgtaatcctagcacttcgggaggctgaggcaggcagatcgcgaggtcaggagttcgagaccagcctgaccaacatggtgaatccctgtctctactaaaaatacaaaaattaggccgggggcggtggctcacacctgtaatcccagcactttgggaggctgaggcaggcagatcacgaggtcaggagattgagaccatcctggctaacacggtgaaaccctgtctctaataaaaaataaaaaaattagccaggcgtgttggcgggtgcctgtagtcctagctacttgggaggctgaggcaggagaatggcgtgaacccgggaggtggagcttgcagtgagccgagatcatgccacagcactccagcctgggcaacagaggagactccatctcaaaaaaaaaaaaattagccaggcgtagtggtgcatgcctgtaatcccagctactcaggaggctgagacaggagaactgcttgaacccgggaggcggaggttgcagtgagccgagattgcaccactgcactccagcctgggcgacagagcgagattctgtcacacacacacacacacacacacacacacacacacacacacacacacacacacagagagagaatttgagacaagggacctgtggtcctaactgttcttgaggctgagcctcttaaaaaaaaaaaaaaaaaaaaaagccagtgcagtggcctacacctgtaatctgagcactttgggaggccaaggcaggtagatcgcttgatcccaggagttggagacccgtctggcccatatgatggaaccccatctctacagcaattagccaaacgtggtggtgtgtgcctgtggtctcagctacttgggatactgaggtgggagaactgattgagcctgggaggttgaggctgcagtgagccataattacgtcactgcactccagtctgggtgacagaggcagaccctctctggaaaaaaaagttgacacaaggccactgggcctggcaaggagaagatcaccattatactgcagtagtaggtggcagagtgactaagaaggaagcgtaaaagatggatgggagcacttagaatttatctttaaaatacctgatttttttattttttgagacagagtcttgctctgttgccgaggctggagtggcgcgatcttggctcactgcagcctccgcctcccaggttccagcgattctcctgcctcagcctctcaggtagctgggattacaggcacgctcaccatgcctgggtaatttttgtatttttagtagagacggggtttgaccatgttggccaggctggtcttgaactcctgacctcagctgatctaccccccttgacctcccaaagtgctaggattacagaagtgagccatcacgcctggcctctaaaagacctgatgtttgtggtgaccattttctggaaaaatttgtgacattaaattgtggatatgtcttctttgaccaatccagcagctgtgggagacatgtttagaacagcgttgtctttctgtgatggtggacgtgctgtatatctgcactgtccagtaccatagctcccagccacatgtggctattgagcattgaatatggtcagtgtggccaaggaactgaatttgaaaatgaaaaattttaggccaagtgcagtagttcacacctgtaatcccagcacttgtggaaggctgaggcaggcagatgacttgagctcaggagtttgagaccagtctgggtaacatggcaagacctgtcttttattcaatactttaaaatttttacttacttgataaaaaggaagaatattttaaaatttaaacatcagttttttgttgttcttgtttttgacacagggactcactctggcacccaggctggagagcaatggtatgatcatggctcactgtagactttacctactggctgaagctgtcctctcacctcagtttcccacccttacccacccagtagctgggattacagacactcaccaacacgcctggctaatttttattatttgtagaaatgaggtctcactgtattgcccaggctggtctcgagctcctggcctcagacatcctgggattacaggtgggagtcactgtgcctgaccagcattgtttttttgtttttgtttgtttttttaaagataaattaattggccatgtgtggtggctcacgcctgtaatcccagcactttgcgggggctgaggctggtggatcacttgagataggagttcgagaccagcctggccaataaggcaaaaccctgtctctactaaaaatacggaaatgagccgaacatagtggtggatgcctataatcccagctacttgggaggctgaggcgggagaatcacttgaacctgggaggcaggattgtagtgagctgagatcgtgccattacactccagtctgggggacaagatcgaaacgctgtctcaaaaaaaaaaaaaaaaaaaaaagataaattaattaggccgggcacagtggctcacgcctgtaatcccagcactttgggaggctgaggtgggcggatcacctgaggttgggaagttcagaccagcctgaccaacatggagaaaccccgtctctactaaaaatacaaaattacccgggcatggtggtgcatgcctgtaatcccagctaccggggaggcggaggttgtagtgagttgagatcgcgccattgcactccagcctgggcaacaagagcgaaactctgtcttaaaaaaagaaagtcacaatgtggctagtagctaccacgttgggcagtgaagctgtgacattaccagttgtaggattgaatgcaatccagactttttgtctgttgtgttcacacttgaagcagtgactctgctgcctaagtatgtataatttttacttttttttttttttttgacggattctcactctgtcgctcaagttggagtgcagtggtgtgatcttggctcactgcagcctctgtctcctgggttcaactgatcttcctgcctcagcctccctagtagctggaactacacgtgtgtactaccacacctggctaatttttgtatttctttttttttttttttgagacggcgttgctctgtcacccagactggagtgcagtggtgcgatctcggctcactgcaacctctgcctcccgggtacaagcggttctcctgcctcatcctcccaagtagctgggactacaggtgcatgccaccacgcctggctagttttttgtatttttagtagagacggggtttcaccgtgttagccagggtggtctcgatctcctgacctcgtgatcctcctgcctcagcctcccaaagtgctgggattacaggcatgagccactgcatccagcctaatttttgtatttttagtagagacggggtttcaccacgttggccaggctggtctcgaactcctgacctcaagtaatctgcccgcctcagcttcccagaatgctgagattataggggagagccaccacacctggccccgtactcttttatattaatatccatgacgccttttaccttttctgaaatagattttttcagtttctctactgtcactctatcaaaatttgtaaattttccttggaatattagacagaggattaagccacgtgtttttccagtccaacttttgttacatctgtattttccttttacatgttgactggttcaaactggctagcatcccaagtaaggtgtgaattaaatcctgacatggggctgggcgtggtggctcatacctgtaataccagcactttgagaggccaaggcaggcgaattacctgtggtcaggagttcaagactagtctggccaacatggtgaacccgtctctacaaaaaatacaaaaattaaggctgggtgcagtggctcacgcctgtaatcccagcattttgggaggccgaggcaggtggatcacaaggtcaggagttcaagaccagcctggccaagatgttccccgtctctactaaaactacaaaaattagctgggcgtggtggcgggtgcctgtagtcccagctactcagaaggctgggacacaagaatcgcttgaacccgggaggtggaggctgcagtgagctgagattgtgccactgcattccagcctgggtgacagagtgagactccatcttaaagaaaaaaaaaaaattcctgacaacggactgtcaaagctatttgcttctcacagtctgtgggtattatagatggacggggacccgccaataaaggaggggaaggctccttttgtgaaactgatttgcttctgtcttctaaatcagtatgtgtacttgggcctactaatcaagtcttactgttttgtctgtaactttttttttttttttttttttgaggtggagtctcactctgttgcccaggctggagtgcagtggcaccatctcggctcactgcaagctccacctcctgggttcatgccatttttctgcctcagcctcccaagtagctgggactacaggcacctgccaccacgcccggctaattttttgtgtgtgtggtagagactgggattcactgtgttaggatggtgtcaatatcctgacctcgtgatccgcctgcctcggcctcccaaagtgctgggattacaggcgtaagccaccgcgcccggcttctgtaacttttatttattgtaagttgttagctattggaattctggacagaacagagctcctgagtctgttcactgctgtaagaagtaagaagtgtcatgactctttttcagcagaggaattagtctattaatgacatgtggctggaaatagacctgccgctcagaacctgttctggagttaagtccttccaagatgggcctagggaatctgagaagcacagcaggttcctctcagcaagtgctgctgaaccccaaactaagctcacacattcttcttgggttctgcctggagagtccctattagcctcatccctaagcaaccactatgctcctttttttttttggagatggagtctcgctttgtcgcccaggctggagcgcaatgtcacaatcttcactcactgcaagctcagccccccgagtagctgggattacaggtggacgccaccaggcctggctgatttttttttttgtatttttgtagagatggggtttcaccaggttggccaggttggtcttgaactcctgacttcaggtgttccacccgcctcggcctcccaaagtgctgggattacaggcgtgagctaccacgcccagcagctgctttctgtctctgtagatttacctattctggatatttcatacaaatatggtatgaaacatgtggttctttgtgactggtttcttttactgagcatagtattttcaagattcatccatgttgtagcatgtttcagtacagtactgtacttcgttccttattgttgctgagtagtactccactgtatggctataacacatggttagatatgtagcttagataggattgttttgttaattaaaagctaatgaacaaagatttcaaagtgtgagatattagtcattagtaggctggccattgaacagctccacatttcaaaatgtgagatactaaattagttattagtgggctggcccattgaacagctccagaaggccttcaggaagttgtccagacaaatgtgagtaagcatcatggtcacacaaatgtgagaaaattaccaaagactgctatgtgaaatgcggagagttgctcattaatgcatggttttaatttacctactgaagcatagtcagtagccactgtagcatctgaagaacatatgatggacacaccactcccacactcagcacccagataagcaaggcaggcagcaatgcagatgagctatagttatcccaggaaatcactttgacttgtaaagtgtgaaaaggactggccttcacctatcattctttctatagcagagctccctaaagctcagaaagccacagctggctggatgtcatggctccacctattataatcccaccactttggaagacagaggcgggtgggtcacttaagcccaggagttcatcactgagcccaggagtttgagaccagcctgggcaacatggcaaaaccccgtctccacacacacacccacacaaatagaaaaaaatttagtcgggaatggtggcacacacctatagtcccagctactcgggaagctgaggtgggagggtcacctgagcccaggagtttgacgctgcagtgagccttgatgacagcactgcactccagcctgggcaacagagtgagaccttgtctccaggaaaaaaaaaaaaagagaaagccatccccttccttgacatcatctgtaatgagtaaacagacattaaaacagtaagagtaaacaggtgtaagacatgctagaaccaaagaaccaagagttgatgatttcagagtgactcaaacatatgtgacattgttattatttcttcctctggtgtgtacagaaaaaagatacacacatctaaaagaaatgtatgcaaaaacatcataaaagcatagaaaacaaacataatagggtttttttttttgttttttttttttgagacctggagtctcgctctgtcccccgggctggggtgcagtggtgtgatctcactgcaacctctgctcccgggttcacaccattctcctacctcagcctcctgagtagctggaactacaggtgcccgccaccacgcctggctaattttttttgtatttttagtagagacggggtttcaccgtgttagccaggatggtctctatgctgacctcgtgatctgcccaccttgggcctcccaaagtgctgggattacaggcatgagccaccgcgcccgaccctttttttttttttcccccgagatggagtctcgctctgtcacctaggctggagtgcaatggcacgatctcggctcattgcaacctctgcttctcaggttcaagcaattttcctgcctcagcctcccaagtagctgggactacaggtgcgtgccaccatgcctggctaattttttgtatttttagtagagatggggtttcaccatattagccaggatggtctcaatttcctgacctcatgatccgcccgcctcggcctcccaaagtgctgggattacaggtgtgagccaccacgcccggcctgtttttttttttttttttttttttttttttttttttttttttttgagacggagtttctctcttgttgcccaggctggagtggaatggcgtgatctcggctcactgcaacctccgcctcccaggttcaagcggttctcctgcctcagcctcctgagtagctgggattacaggcacccgccaccatgcctggctaatttttttttgtatttttagtagagacgggattttgccatgttggccagactggtctcgatttcctgacgtcaggtgatccatttgcctcggcctcccaaagtgctgggattacaggcgtgagctgccacgcccggtcatgtaacagttttaaaaagcccatacggtcatactgaatatagacatagacagagttaatcaaatacatcagagactgagtttgtgaagttaaggaaaaatattcaaactagttaatcgccctaagttgcatattaattaatcgagtctttcagtgtcaccaaggtttgcctgagtaggcaaaggagaataatacgctaaagctgtagaatcacttctcttgacacggggaaggaaggagggtaagacagtggaatgtttagaaatgtgtactctgaaacggattgcttaatttacttcagtgtccaattctgcctcttactggctagcagtgcgactgacgttgaacaaattagcctttccatactcagtttcttcatttgtaaatgagagtattagaacttacaggaggactgttgcgaggattgtttgtttaaagtttataactgcattatttgttagctgtttcttatatttttcctcttctacaaagtagtggtgggagacaaggcttccctacatttagtttgatgcctgtggttctaagtataaggagaaaacggaagggaggaaagaggaagtaaaaaaatgaaagatgacctaaataaatggaaaggcgtccatgttcatatgtcagaagacttaacattgtaaagatgacagtactccccaaatcgatctgtagattcagtgtaattcctatcaaaattccagctggcttttttgcagaaattgacaaactgttactaaaatacataccaaaattcaggggacccagaataaccaaaataatcttggaaaaaaacaaagctggaggactcacacctccagattttaaaacttactgcaaagcaacagtaatcaagactgtggtactagtataaaggtggacaatatagaccaatggaataggattaatccaaagtaaaccctcagttgctaattagttgatttctcaagtgtgccaggaccatccagttggggggaaaatagtcttttcagtaaataatgctgaggtgactagatttccaaatgaaaaagaatgaagttggaccccttacctcatatcatgtatgaaaattaactcaaaatgaatcaaaggcctaaagtgtaagacttaaaactatagaaagaagcatatatattttttttacgaccttgaatttggctgtggtattttagatatgccaccaaaccatcagtaaccaaagggaaaaatagataaatttgacttcaacaaaataaaaaacgttgtgccccaaagggcatcatcaaaaaaataaaaaaaacaactgagtttaaaaatgggcaatgggggctgggtgcggtggctcattgctgtaatcctagcactttgggaggccgaggcaagtggatcacctgaggtcaggagtttgagaccagcctggtcaacatggtaaaaccccgtctctactaaaaataaaaaaattagccaggcgtggtggcagacgcctcccagctatttgggaggctgaggcaggagaattgcttgaacctgggaggcggaggttgcagtgagccaagatcgcgccactgcactccagcctgggcgacagagtaagactctgtctcagaaaaaaaaaaaaaaaggtaggggggcaatggaccaggcgcagtggctcacccctgtagtcccaacacttagggagccaacacgggagaatcacttgaggctaggagtttgagactagccagggcaacacagcaagaccctgtctctacataaaagataattaaatttgtttttcccccgagacagtcttgctgtcacccagactggagtgcagtggtgccatctcagctcactgcaacctccgcctcccaggttcaaacaattctcctgcctcagcctcccgagtagctgggattacaggtgcctgccaccacgctaggctaatttttgtgttcatagtagagaatggtttcaccatgttggccaggctgctggtttcgaactcctgacctcaagtgatctgcccatctgagcctcccaaagtacttggattacaggcgtgagccactgcacccagccaagataattaaatttttagaaagtgggggcatcacttgagcccaggagtttaagaccatcctgggcaacatggtgaaactccatctttacaaaaaaaacacaaaaattagctgggcgtggtgtgtgtgcctgtactcctagctacttgggagactgaagtgggaggattacctgagcctgggaggtcaaggttgtggtaagccatgataacaccacctcactccagcctggatgacagtgagaccctgtctcaaaaaaaaaaaattaaaagttgtaaaagaaatactgttatttgtgtattgttactggtgacttaattagatataactgacttttggttaaataaacctctactccaaacttataagttatttctgagactaaacctagcctggaaaatgacacgtctgggagagctaagcgtgatttcctttcttgacaaaccatgtacttgtaaagaatgctgcattatagcaaagtggaaaggagagataattctgcaaaatttctcctgcgtttttcaaggagaaaacagcaagtttgattttctgtgcttgtactttttacttctcaacttctgtgtattgccgcactcccagtatcccagaaatcacttaggctttcattttgtccgataatcacttgtaatttttgtctttgtcaccattagtggctaaatgattttattctttttctgggccaaatgttctttatcagatatttttctttttcttttctttcttttttctgagacacagtctcactctgccgcccaggctgtaatgcagtagtgcaatctcggctcactgcaacctccacctcccaggttcaagtgattctcgtgcctcagccttccaagtagctgggattacaggcagatgccaccatgcccggctaatttttgtattttcagtagagacggggttttgccatgtttgccaggctggtctcgaactcctgacctcaagtgatccgcctacctcagcctcccaaagtgctgggattatgggcgtgagccaccgtgcctggctggactagggtctttaaacgtgaattccctccctataagcaaaggtggagacagagtctggacattctaggaagggaaggcacaaacagaatagaagacacatgcagtaatctcagacacaccagagcacccggaaggaatggagtgcaggctgaaagtgcagaggggaaggtggggctggagagggcccaaggacaggcaatgatttattccccatctataaggaaacttttcaaaccataacagaagatttaagtcaatactggaacaaatattgtgggcatgttgaactataaacaaagcaaagatagctctttttttttttttttgagatggattctcgctctatagaccaggctggagtgcagtggtgtgatctcagctcactgcaagctccaccttccgggttcacgccattctcctgcctcagcctcccgagtagctgggactacaggcgcctgccaccatgcccggctaattttttgtatttttagtagaaatgttagccgggatggtctcgatctcctgacctcgtgatctgcccgcctcggcctcccaaagtgctggaattacaggcgtgagccaccacacctggccgaaagagattatttctcaagaattgaatgtcttctaggtagggtgctacgcaaaggtggcagccttttctttttctttttctttttttttttctgatacgatggagttttgctcttgtcgcccaggctggagtgcaatggcgctaactcggctcactgcaacctttgcctcctgtgttcaagtgattctcctgcctcagcatctcagtagttgggattacaggtgcccaccaccacgcccacctaatttttgtatttttagtggatatggggttacaccatgttggtcaggcttgtctcgaactcctgacctcaggtgatccacccacctctcaaagtactgggattgcaggcatgaaccccagcacactcggccaaagcagccttttcttgaactggggaattcctgttgacgtttctttgcatcccatagggtcctggttgtttgactttgggcaaaagcccatgcagattaggccttatgagagatgtaaagtttattaaatctttatttggtgagacagggtcttactgtgtcactcaggctggagtgtagtggcatgatttcagctcactgcaacctctgcctcctgtactcaagtgatcctcccatcttagcctcctgagtagctgtgaccacagatgcgcaccaccacagccagctaattttttgtattttgggtagagatggggtttcactgtgttgtttaggatggtctccaactcttaggctcaagcaatttgcctgccttggcttcccaaagtgctgggattacaggtgtgagccaccacgcccagtgtctatttttttattttatttatttatttatttttgagacggagtctctctctgtcacccaggctggagtgcagtggcacgatcttagctcactgcaagctccacctcctgggttcaccccattctcatgcctcagcctcctgagtagctggaactacaggcgcccttcacgacgcctggctaattttttgtatttttagtagagacgggatttcactatgttagccaggatggtctcgatctccttacctcgtgatctgcccacctcagcctcccaaagtgctgggattacaggtgtgagccaccatgcccggccaatatttttttatttttatgagatagggtcttgctattttgcccaagctggtctcaaactctggactctagctgtcttcccacctcagcctcctgagtagatgggattacaggcatgagttgccacacttgactctaactggggaacttcactctctgtcttttttttttttgagacgaattttcgctcttgttgcctaaactggagtgcagtggcacgatctcagctcactgcaacttcctcctcccgggttcaagtgattctcctgcctcagcctcctgagtagctgagattacaggtgcggaccaccatgcccggctaatttttctatttttagtagagatggggtttcaccatgttggtcaggctggtctcgaactcctgacatcgtgatccacaggcctcggcctcccaaagtgctgggattacaggcgtgagccaccatgccaatccttttttttttttgacagagtctcactgtgttgcccaggctggagtgcagtggcgcgttctcagctcactgcaacctccgcctgcctaattcaagtgattctcatgcctcagcatcctgagtagcctttcaggggttacaggtgcctgccaccaacccagctaactttttttttttttttgagacggggtttttctcttgtttcccaggctggaatgcaatggcgagatatcggcttactgcagcctctgcctcctgagttcaggagattctcctgcctcagcctctcgagtagccgggattatgggtacatgccactacgtccaacttatttttatattttttgtagagacggggtttcacaatgttggccaggctggtcttgaactctggacctcaagtgatccgcctacctcagcctcccaaagtgctggcattacaggcatgagccattactcctagccttgactgcatgctcttgtttgaagatatgcattgagcacatttccctatcatcgatatgcttcttattgtgctttcatgattagtagtatcttcaatttactccctttttgcaaaaaaaaaaaaagttactagattttgtagatttggataaaattctataatatctgtatctatatatatacacacacacgtattcactgctgtatgtaatattgtcctgagaattcacaaatgagtaatggcagcactgtcagccctctgagtttttttgttttgttttcattgtttatttttgtcgttgtttgccctctgagttttcttctggtacccctgtggattgtcttatccattctggttggggaacataccctttagacaatatagttttgataatgagtatttattattattattattattattattattattattattattattatttttgagacaagagtctctgtcacccaggctggagtgcagtggcatgatcttggctcactgcaacctccacctcccaggttcaagcgattctcttgcctcaccccaccacgcctgggtaattttaatatttttaatagagatggggtttcatatgttggccaggctggtctcaaactcctgacctcgtgatctgcccgcctcggcctcccagtgtgctgggattacaggcgtgaatcaccatgcccagctgagtgtatataatttaggattagtttgactataggtaacagagacttgaaaaataccaccttaaataagacagtcatttatttctcattcatatggaagaaacatggaaggtaggcagtcttggggctgagatggtggctcccaagatcacctgagatccaggctcctttttaccttttggttcttccagccccacggtatggcattcattctcacataccaggatggctgcttagaaaccagcccttactttagatttaagcagcaggaaaggaggaggataataaagacttccctttaagaaagactttctggaagtcccacaacatactgctgattctcacatctcatggtacatggccatgtctccaagggaagctaggaagtgtagtctacaacaaagtacatagctaaaaatcgaagtatggtctaggagggaagggcgggaattgggatggttgaccatcactgtctgccagatggaaggaatctgcagatttctctcttttttccccccactgggggcgagagtggtggtaacagctttattgaaatataatccacatatcttacaattcacctttttaaagtgtgaattatatatactgtgggctgggtgcggtggctcacgcctgtaatcccaacacactgggagagacaggcaggaggatcgcttgacctcaggagtttgagagcagctggggcaacgtggtgaaacccggtcactactaaaaatacaaaaaattagccgggtgtggtggcatgcacctttagttccagctacttgggagactgagattggaggttcacttgagcctggggaggctaaggttgcagtgagtggagatcgcaccactatactccagcctgggcaacagagtgagaccctgtctcaaaataaataaaatgtgtgaattatatatactataatcaatagtttatagtatattcatagagttgtgcagccatcaccacaataattttggaaaaatctttttacctgagaaactccagtattccattagtcattttccatttctctccacccccaagtccctgccctaggcaactaccagtctattttctctttctgaatttgtttattctggacaattttatataaatggaatcatgcatgttggtttttgtgactgggttctttcacttatataacatttccaagatctatccatactatagcatatatcagtactttatcctttatcgctgaataatattccattccattgtatggatatattatattcatcagttgttggatatttgggttctttacattttttgacaatatattatgaataatcctgctatgaatattcatgtagaggtacaagttgttatgtggacatatgtttttgtttctcttagatatatacctaggaatagaattgcagggtcatacctactcacatcctttgctcattttttaattggattagattatttgtctttttattattgaattgtaagagttctttattttttaattttttctatatactgtatttaggcctggggaggtggcttatgcttgtaatcccagcactttgggaggctgaatcgggaggattgcatgagcccaggagtttgagaccagcctgggtaatatagtgaaacgctatctgtataaaaattagtcagctgtggtggcaggagcctggtagtcccagctactggagaggttgaggtgggaggatcgcttgagttgagcctgggaggcagaggctgcagtgagccaatattgcaccactgcattccagccttggtgacagaatgagaccctttctgaaaataactacataatagagaaacacatagataggttagataggtacatagattggatagatgcgtagatagatgggcagtggctcacgcctgtaatccctcagcactgtgggaggccgaggcgagtagatcacttgagctcaggagttggagaccagcctgggaaacatggcaaaaccctgtctctgccaaaaatacaaaaattagctgggcgtggtggcgcatgcctgtggtcccagctgctggggaatttgaagtgggaggatcacttgagcctcggaggtggagattgcattgagccaagatcacgccactgcattccagcctgggtgacagagtgagacctcatctcaaaaaaaaaaaaaaaaaaaaaaaagatagatggatagataaatagcgtacttcatgtcagaaggagttctctctttttttttttttttttttttaagacacagtttcactctgttgcccaggctggagtgctctgttgcccaggctggagtgcagtggtacaatctgggctcactgcaacttctgcctcctgggttcaagcgattctcctgcctcagtctcccgagtaactgggattacaggtgcccaccaccacacccggctaagttttgaattttttgtagaaacggggttttgctgggttggtcaggctggtctcgaactcctgacctcaagtgttctgcttgcctcagcctcccaaagtgctgggattacaggtgtgagctaccgtgcccagcccaaaaagagttctttatgatttcaaccttgcaagagatcctgagccagaccaccaacctaagctgcttttttgtagttgagtcataagagtttgagacaaggttccactctgtcacccaggctggagtgcagtgatgcaatcatagctcaccacatcctccacctcctgggctcaagcaatcctcccacctcagcctccttggtagctgggactacaggtgcatgctaccacaactggctgatttttttttttttcttttccttctttttttagagacagtgtctcactggggttccccaggctggagtgtagtgatgcaatctcagctcactgcagcttccacctccagggctcaggggattatcccacctgagcctcccaagtaactgtgattagcatgcaccaccgctcctggctaattttttgtatttttagtagagacagggtttcactatgtttcccaggctcgtcttgaactcctggactctcaagcagtccacctgtttcggcctcccagattgctgggattataggcgtgagccactgcgcccggcccttttctttctcccctcccctctcatgcttccgtccgtccttcctttctcagtgtctcactatgttgtcagggctggtctcttaactcctgggcctgagcattcctcctgcttcagtctcccaaagtgttgggattacagacatgaaccactgtgctcggcctcaattgatttttcttttttgagacggagtttcgctcttgttgcccaggctggagtgcaatggcatgatctcggctcaccacaacctctgcctcccgggttcaagcgattctcctgcctcttgctcctgtgtagctaggattataggcatgtgccaccacgcctggctaattttgtatttttggtagagatggggtttctccatgttggccaggctggtctcaaactcctgacctcaggtgatctgcctgcctcggcctcccaaaatgctgggattataggcgtgagccaccgcgcccagccaagaatgctgtttctttacaaacaaatctagattggtaaaagaaggaatatccaaacttagaaagattgcagaatgtctacccaaacaacctgccgatgacttttttggttctttcctcccttgggtactccctttcatcagtcctttcattgtttttaccctgcttgacaaattgtttcctttttttttttttttttttttgtgagatggagtcttactctgtcccccaggctggtgtgcagtggcccgatcttggctcactgcaagctctgtctcctgggttcacgccattctcctgcctcagcctcccaagtagctgggactacaggtgcctgccaccatgcccggctagttatttgtatttttagtagagatggggtttctccgtgttagccaggatggtctcgatctcctgacctcgtgatccacccgcctcggcctcccaaagtgctgggattataggcgtgagccactgcgcctggctcaattgattttttaatgttaatattgtatcctgcaaccttactgaacttgtttattctaaaagttttctttaggatttcccacattacaaaatcatctcatgtgtgaattgagatagttttacttcttcctttccaatttggatgtcttttatttcattttcttaccttattgccctggctaggacctccagtatcctgctggatagaagtagcaagaacaggccaggcgtggtggctcacgcctgtaatcccagcactttgggaggctgaggcaggtggatcacctgaggtcaggagttcaagaccagcctggccaacaaggtgaaaccccatctctatcaaaaattagctggatgtggtggtacgtgcctgtaatcccagctacttgggagtctgaggcaggagaattgcttgaacccgggaggctggaggttgcagtgaactgagattgggccagtgcactccagcctgggcgacagagtgagactccgtctcaaaaaaaaaaagaagtggcaagaacagacattcttgtcttgttcctgatcttagggggcagacctttttttcagtcttttaccattaagtataatgttagttacgagtttttaatgtataaccttttggtgccaggtggatcggcgtactagaagtttgaatttgagtatgctaatagaggtttatgccccatggttaccaaagcatgtgtcatcctgtaagctacctatgacttcttgtgcattgcaggtaatatctgtgttttgtgtttcagcaatggctgccatccggaagaaactggtgattgttggtgatggagcctgtggaaagacatgcttgctcatagtcttcagcaaggaccagttcccagaggtgtatgtgcccacagtgtttgagaactatgtggcagatatcgaggtggatggaaagcaggtgagtatacttttcataacaactgatgccattttccatgttagaatatttatggagcatgtagagaattagagctttttgcctcttcagtataccatataacaaaaatgttggaaagaagaatccattctcatcctgccatcttagtccaagtttgttctttttttttttttggagacggagtctcattctgttgcccaggctagagtgcagtggctcggtcttggctcactgcaacctctgcctcccaggttcaagtgattctcctgcctcagcctcccaaatagcagggattacaggcatgttgccaccatgctgagctcatttttcgtttagtagagatggggtttcaccaggctggtctcaaacttctgacctcgggtgatccacccacctcagcctcccaaagtgctgggattacaggagtgagccactgtgcccagccttcccccaggtttaaaggattctcctgcctcagcctccccagtagctgggattacgggaatatgccaccacacctggctgatttttgtatttttagtagaaatggggtttcactacgttggccaggctggtcatgaactcctgaccgcaggtgattggctgttttttcatttttaactgctactcatccagactttgtttacattcatatgtatttgacatggtgtccttagcatatgtgttttttttttgttttgttttgttgtttgagacagagtctcgctctgtcgcccaggctggagtgcagtggtacaatctcagctcgctgcaacctccacctcccgggttcaagcaattcttttgcctcagcctccagagtagagtagctgggattacaggcgcacgccgccatgcctggctaatacttgtattttgtaaagatgcaattttgccatgttggccaggctggtctcaagctcctgacctcagatgatccacctgcctcagcctcccaaagtgctgggattacaggcgtgagccaccttgcccagccatatgtgctcttttcaagtttacgtatatttgaagtttagttcattgccatatagataatgctcagatgaacttctttgtatgcttggactttgacaaaaattctgtcaaagtatttaatcagatgtcccagtattagattactagttcaagctctgcctcctgggttcacgctgttctcctgcctcatcctcccaagtagctgggactacaggtgtccaccaccagactggctaattttttgtatttttagtagagacggggtttcaccgtgttagccaggatggtctcgatctcctgatcttgtgatctgcccgtctcggcctcccaaagtgctgggattacaggcatgagccactgtgcccggccaaaagatttttttttactttaacataaaatagcctgccacagttgttttattttattgtcattgatggtgagaacagtgcttccccatttctgtcctaaaagccctctggcaagactggaacaaagctcttgtgaaattggagggtttttttgggttttaattttggttttggtttgtttttgtttttttttttaatcttctgcttccttttgttgtctaagtaatgctttgcttggcctctcatacttttttttttttctcttaaataaagagacagggattgtactttgtctcccaggcctgcagtgctgtgacatgatcatgcagccttgaactcttgggctcaagtgatccttccacctcagcctcccaaatagctggcactgtaggtatgtgccaccacacctgggtaatttatgtttttagagatgaggtcttgtgttggtccagctggtttcaaacaactgggctcaagttcttccatctcagccccaagtggctgggcttacaggcgcaagccagcgtgcccagctctcctatacatcttttgaagtgggtcagctgaaaggaaaaaacccctaaaactagaatgaggtgctcttctccaacattctcatttttcttgagcattcagttatatgtctcatatgctgctaacacttgatatattagcttccattcatcccctttctcctttcttactttgtttttgtttgtttgtctagagacagagtctccctctatcacccaggttggagtgcaatggcatgatcttggtttacaacaacctccgcctcctgagttcaagcaattctcctatctcagcctcccgaggagctgggattacaggtgcctgccaccaagcccagctaatctttgtatttttagtagagacgaggtttcgccatgttggccaggctggtctcgaacttttgacgtcaggtgatccgcccgccttggcctcccaaagtgctgggattacatgcatgagccaccgtgcctggccacttctacttgtccacattacttatttctttctgtcctagggccacctagcctccttttgtggcactgtgtgaggaatgtgggttagatcagctgctcagaactccagggtccctcattgtagggcttcctgatagttgtttgaccatcagtaagctcctgacctttgagccttcctcatttgtaaaacggtttttataggtgacatcaaggttctgtgaagtaacggaaaatgtttggcagcaccaaagcgctttctaagagatgaatactgccatgttcaaaaccctctttcatagtttgtagtccttttttttttttttttttttgagacagagtctcgctctgtcgcccaggctggagtgcagtggcgtgatctctgctaactgcaacctctgcctcctgggttcacgccattctcctgcctcatcctccggagtagccgggactacaggcgcccgccaccacgcctggctagttttttgtatttttagtagagacagggtttcaccgtgttagccaggatggtctggatctcctgacctcgtgatctgcctgcctcccaaagtgctgggattacaggcgtgagccactgcgcccgtcctatagtttgtgctcttttttattcaaatacagagtgagccacgatgattgctcttatgctaataggaactctaagatactttctggcccaagtatagatggaaaaaatacaacaaataccagcctaacagaattttgggatgtaccctgaaggtggcaaaccaatacagagggtgttaattcagcctcagccaagcatggatgcttggacataggtgtttttgtggtcctgataggaaaactggttttatatggacacagggcccagttgtgacaaactaggtagaaatgtgatgacatcttcaggattggtgtcaagttatagccctcttacctaacttagattgatgcaccatacatagaaagatccattggcttggggaagcaatgtcaggttggcattttcatagcttatttctcaaaagcctagtagtgaatgtatattactggttgtatcctaacattttctccagagagtggctgttaattgctgcatgtctgtaagcatgaactggaagggtcttttccatctgtggcagtatgtatgttttggaagcagctctttggttctcttggaaacattatttctgcctgggcatcttggaacaaccagaatcttgcccataagaaatttagagaccttgacttaaaaccttgaggcatggtctgtgagtatttttcttgtgctgcaaaccttggacatcactgaccctcgcaagatagggggaggttctcacttgaggagagtcccctggaataaaagtgtttgattgaagagcatattacaggctacctgcctgcctcagagcaactcaagagtccccaagatgggagagggtactgtgtaggaatattcatttaacagtatgcaatagtataaggccagacgtcgtagctcacacctgtaatccagcactttgggaggctgaggcaggaggatcaccagaggtcaggagtttgagaccagcctgcccaacatggcaaaacccaatctctactaaaaatacaaaaaattagctgggcgtggtggcaggcacttgtaatcccagctacttgggaggctgaggcaggagaatcacttgaacctgggaggcagaggttgcagtgaactgagactgcgccactgcactcaagcctgggcgacaagggcgaaactctgtctcaaaaaaaaaaaaaaacagtaggcaatagtacagcctagggaaccatacaagattgtaggtgatcatggtaccaagagtaggcctgctcacaatgaaaaggccccttttgatatgagacagactcaacatcttggaagcattttatcaagcgccaatagaggctggatatatgactaaacaccgtggggtggagggggccgggagagtgggatttgccagggagtaaatgagctccattattgtgagggcagacagattgtgataattgggcatcagtatatcttagttacacatgccagaatgatggtttgcatgacagaagtacagtgggccttgtggaggttatttgtgatgcatcctggggcaaaagttcgggggtggaagagccatcaattttaaggaagaaatcatttagaaactgaaatttgggctgtgaaggtgctaagagaagaaagatgtgttccaagtattggagggagacctcttgggcctcaaagggcctctgtacagaggatgtttaacatggagtctggtgataagaatggggtagcagagctgggtgcagtgctgggcagtgttgaatgggacttgtattcagagcccaggcatcagtttacccttctaccacaggagggtgaggatgtacccggatgtgaaaggagtactctctcaccttacgtgatgcattatttcagacatttcttgagtagtaaaggcacagccaaaagggctttcctgtcatctcaggccttgcctaacagccagcatggtgtcttttcctacctaccaactcaaaatacagatttgtttccatggtttccacattatagcagaaaatttacttagtcttgtatcttcctctctcgcctgtatgcctggtaggatgttatttaaaatttgatttcttccctcctgtctgctttctttcctagtagaatgttatttataattaaacacttttataagctacagagttatttttgacttgacattttgaattatgccacttggttcagttctagtatctgttttgtttttttgtttttttcctaattgagtcaaggtctcactgcctaggctgcagtgcagtggcacaatctctgcttactgcaacctccgcctcccgggctcaagcagtcctcccacctcagtctcccaagtagctgggactacaggcgtgcaccaccacagtcagctaatttttttttttttttaaatggagtttcgctcttgttggccaggctggagtgcagtggtgcaatctcagctcattgcaacctccactcattgcaacctccgcctcctgggttcaagcgattctcctgcctcagcctcctgagtagctgggattacaggcatgcttcaccacgcccagctaattttgtattttcagtagagatggggtttctccacatttgtcaggctagtctcgaacttccgacttcaggtgatccgcccgccttggcctcccaaagtgctgggattacaggcgtgagccaccgcacccagcccacactcagctaagttttattttatttattttttttttttttagagatggaggctcgctttgtcgcccatgctggagtgctggagtgcagtggcacgatcttggctcactgcaacctttgcctctcgagttcaagcaattcacctgccttagcctctccagtagctgggactacaggcgcacgctgccgtgcctggctaatttctttcgtattttagtagggacggggtttcaccatgttgcccaggctggtctcgaactcctgagctcaggcagtcagcccgcctcagcctcccaaagtgctaggattacaggcatgagccaccgcgcctggccacactcagctaatttttaaggtgtttttgtagaggtgggttctcagattttcaattttgagaaatttcaacctaaaataatttaaatatactctcatttgagcttgatgctcataaaagtgaatactcggccgggtgtggtggctcatgcctgtaatcccagcactttgggaggccgaggcaggcggatcacgaggtcaggagatcaagaccatcctggctaacatggtgaaaccccgtctctactaaaagtacgaaaaattagccaagcgtggtggcgggcgcctgtagtcccagctgctcaggaggctgaggcaggagaatggcatgaacccgggggcagagcttgcagtgagccaagatcttgccactgaactccagtctgagcaacagagtaagactccgtctcaacaaaaaaaaaaaaaaaaaaaaaaaaaaaaaaaaaggccaggcgcggtgggtcacgcctgcaatcccaacactttgggaggccgaggcggacggatcatgaggtcaggagatccagaccatcctggctaacacagtgaaaccccgtctctactaaaaatacaaaaaattagccgggtgtgatggcgggcacctgtagtcccagctacttgggaggccaaggcaggagaatggtgtgaacccgggagacggagcttgcagggagcagagatcgcgccactgcactctagcctgggcgacagagcaagactacatctcaaaaaaaaaaaaaaaaaagaaaaaagaaaaaatgtaaatactcctgtgttttactgttttagaccgtctgccatttcaatggtctgccatttcaatgtactatggtaagtgtcactttttctaaaagtgggtggggggattaaccttgcactcttgtggttgtttttcccattacaggtagagttggctttgtgggacacagctgggcaggaagattatgatcgcctgaggcccctctcctacccagataccgatgttatactgatgtgtttttccatcgacagccctgatagtttaggtgagtggccctgcaccctgatatttgtcactgcctgtgtagctagttggcatctggtttctgggcatcaagtggctgaaaagcagacatgaacttcagagaagcaatcatcgtcagtggccggagtcctggagtttgggattgtagagcgtgggccttgggtccctttcagcctaggtctcccatgggtactgtatttaaaatgtatccacctaggcagggcacggtgcctgacacctataatccctgcgctttgggaggtccagacgggtggatcacctgagggtcaggagttcaagaccagcctggccaacatggtgaaaccccgtctttactaaaagtacaaaaaaattagccaggcatggtggtgcacgcctgtagtcccaggtacttgggaggctgaggcaggagaatcgtttgaacctggtaggtggagattgcagtgagccgagattatggcactgcattccagactgagcaacagagcaagactctatctcaaaaataataattattattattattactaaataatattaaatgttatttaaaaatctaactgccttgtaaactagatgaattccagatacaaagatgagtaaactaaggctggtgcggcggctgacacctgtaatcctagcactttgggaggccgaggctggcagatcacctgaggtcaggagtttgagaccagcctaggcaacatggtgaaccccttgtctctactaaaatacaaaaattagctgggtgtggtggcgtgcacttgtaatcccagctattccaggggctgaggcaggagaatcacttgagcctgggaagcagaagttgcagtgagccaagatcatgccactgtactgcagactccatctcccaaaaaaaaagatgagcaaactagatgagttccaaatgtaaagccatctcttttggggaaagactttcttttttttggttgccctgtcttagcctttttctgaagtgtcttagctgatagaagcttgaatgtgatcatttcattagcctaaacacagccacataattcagaagtcagtaagtcagtattcttttttttttttttttttttttttgagagggagtcttgctctgtctcccaggctggattgcagcagcttgatctcagctcactgcaagctctgcctcctgggttgatgccattctcctgcctcagccacccaagtagctgggactacaggtggccaccaccacgcccggctaattttttgtattttttagtagagatgggatttcaccacgttagccaggatgatcttgatctcctgacctcgtgatccgcctgcctcggcctcccaaagtgctgggattacaggcgtgagccactgcgcctggcccagaagtcagtattctttagaaaaagactgaagaatgctaacctgacattctgtgaaaccaggcttgaaaaaacttgctttaggtttgtgctgaagatgatgaggtatctattaataaacttgtgctgcagccctccctgtcatgacagggcagcaggtgggtcaaggatgttgtcgtcattaccacaaacagcctttgagggtctgcttgtggcctcgggttgcctggatagttagtgttagagtgattgtgttgttatggttgtccctaccttaatgatgataactggggttgctccaagatattgagccacttgtttaaggtcatgctggcccaaggagctgagctaagattgagtcctctgtgcagtatgtcccaggacagagaaagagcacgtattccatgccgttggttcacttagatcattttcagcagttatgattgattgattgatttagaggcggggtctcgctctgttgcccaggctggagttgagtggcacaatcttggctcactgcaacctccgccttccaggttcaagcaaatctcctgtctcagcctcccaagtagcttggactacaggcatacgcccccacgcctgggtgatttttgtatttttagtagagaccgggtttctccgtgttggccaggcttctctcaaacttctgacctctggtgatccactcaccttggcctcccaaagtgctgggattacaggtgtgagccaccacacccagcctagttttggttttcaaactaatatgacttccttttgtgaagctgctggaaggccctggaggctgggcagagctttaggccacagagaaaatttgagctagttgacactctcctatcagatacacacataaataacttcacctagatcctattggaatgagaaggactgtgtgcctttgccctcgttatctagtgtataattcttgagggaaaaaactgcctccagagcaaaacattttgtctcttcagtctcacttttttctttttgagacagggtctcgctttcttgcccagtcttgagtgcagttgcagattcagtttactgctgcctcgacctcctgggctcaaacaatcctcccatctcagtccccacccagtagttggtactacaggcacacactgctgcgcttggttaatttttatattttttaggccgggcatggtggctcacgcctgtaatcccagcacttcgggaggctgaggtaggcggatcacctgaggtcaggagttcgagaccagcctggccaacatggtgaaatcctgtcgctactaaaaatacaaaacttagccaagtatggtggcatgtacctgtaatcccagctactcaggaggctgaggcaggagaattgcttgaacctgggaggcagaggttgcagtgagccgagatcgcatcactgcactccagcctaggtgacagagtgagactcttgtctcaaaaaaaaaaaaaaaaaaagtttgaaaatttattcaccaaaagtggcgacagtcaatttattcaaattctatgtacctcaaactccaggaagggggtagactattggtataatttcacatattcaggaaataactacagcacctactaacagaacatctattctaggccaggcactgtggctcacacctgtaatcccaccactttgggaggccaaggtgggtggatcctgaggtcaggagttcaagaccagcctgtccaacatggtgaatccctgtctctactaaaaatacaaaaaaatcatccgggcgtggtggcgagtgcctgtaatcccagctactcgggaggctgaggcaggagaattgcttgaacccgggaggcagaggttgtagtgagctgagattgcgccactgcgctccagcctgggcgacagagcaagagtccatctaaaaaaaaaaaaaaaaaacttctgttctagatgagggaagacagaataggctcccctcaatgcccccaaaaaagtaaatcagaaaataacaacagtaaacccagtaacagtaaatattacaaataacatttgtagaggtgggtcatggttgtatgctgttttgttttatttatttttatttttgtttttttgagacagacttttgctcttgtcacgcaggctggagtgcaatggtgcgatctcagctcactgcactccgcctcccgggttcaagcacttcttctgcctcagcctcccaagtagctgggattacaggcatgcaccaccatgcctgactaatttttgtattattagtagagacagggtttcaacatgttggccagactggtctcaaactcctgatccacctgcctcggcctcccaaagtgctgagattacaggcctgatgagccactgcacctggtctatttatttttatttatttatttatttatttattttgagacggagtctcgctctgtcgcccaggctggagggcagtggcacgatcttggctcactgcaacctccacctccctggttcaaggaatttccctgcctcagcctccctagtagctgggattacaggtgtgcaccaccatgcccagttaatttttttgttttgttttgttgtttttgagacggagtttcgctcttgttgcccaggctggagtgcaatggcacgatctcggctcactgcaacttccgcctcccgggttcaagcgattctccagcctcagcctctcaagtagctgggattgcaggcatgtgccaccacgcccagctaattttgtatttttagtagagacggggtttctccatgttggttatgctggtctcccaactcccgacctgaggtgatccacccgccccggccttcacagtgctgggattataggcatgaaccactgcgcctggcaatctttttgtatttttaatagagatggggtttcaccatgttggccagactggtctcgaactcctgacctaacgcgatccacctgcctcagcctctcaaagttttgggattatagacgtgagccactgcgcccagcctatttatttgtttttaagagatgaagtctcactttgtcaccctggctggagtgcagtagtagcgtgatcatagctcactgctaccttgaatcctggactccagtgatcctcccacctcagcctctcaagtaggtgggaatgcaggcacatgtaccactgtaaactgctaagtttttgtatgtttttgtggagatggggtttttgacttttttgatacagagtctcactctgttgcccaggctggagtgagtgtagtattgcgatctcgactcatcacaacctccacctcctgggttcaagtgtttcttctgcctcagcctcccaagtagctgggactataggtgcacaccactgcgcccggctaattttagtaattttagtagagatgaggtttcgccatgttggccaggctggtctcgaactcctgacctctggtgatccacccacctaagcctcccaaagtgctgggattacaggcacgagccaccacgctgtctggagatggggtttagccatgttgcataggctgttcttgagctcctaggcccaagctgtctacttgccttagcctctcaaaagtgctggaattacaagtatgagtcaccacgcccagcctcttttggttattttcaaaagtcacttttttttatttgagacggagtcttgctctgtcgcccaggagtgcagtggcgcgatctcagctcatggcaagctctgcctcccgggttcacaccattctcctgcctcagcctcctgaatagctgggactacaggtgcccaccactacacccggctaattttttttgtatttttagtagagacggggtttcactgtgttagccaggatggtctcgatctcctgacctcatgatccgcccaccttggcctcccaaagtgctgggattacaggcatgagccaccgctcccggccaaaagtcactcttcagccatttgaaataccagtaaaccccatagggtagaagttatgctgagagttgatgaacaagttagaaaaagaacatgtggaccctgggtcagctgctgccctagaatggggaccccttctgtaagctatgtcagaatcatctaccagcagtgacagatgtcctgtaaagtgcctgcctttgtggggcaggaagtgccccccgtgaaactaccttgtgttgtggatcttttgctcctccagagcccttactcgggccccacctacagagatgctcagcaccactcttggctggactgagaaaaagctgttggttctctgtttaaaggaaagggattatatttcctttttatggttttgaaactagtgagtttcattaaatgtctagcatttttctgaagccacaaagaaagtgtctctgcaatttcactgaggttcttggaaagtcttcaagatagaattgtatgtatccccaaattctctacatttttctttcagaaaacatcccagaaaagtggaccccagaagtcaagcatttctgtcccaacgtgcccatcatcctggttgggaataagaaggatcttcggaatgatgagcacacaaggcgggagctagccaagatgaagcaggcatgatctggggcaggactgtcttgtagtattcttgaactagggccccaagtttggaggtttggggagcccagcaggaaccttcacaggccaggttgttttagaggctcagaagcccctctgtggccctctgaccctcattaattgggatcttcacagaagatccctaagatagttcaccagtcctgtgagatggaatgtttttttatgaggtagtgctatgcccataaggactgctggcctgagaatgaaccatttcattagtagctagtaatcagtggctctagatgtaggaactttcttttttttgatatggagtctcattctgtcacccaggctggagtgcagtggcgcaatctcagctcactgcaacctccgcctccggggttcaagcgattcttctgcctcagactcccgagtagctgggactacaggcaccctccaccatgaccggctaattttttttttttttaatagatggggtttcaccctgttggccaggctggtcttgaactccttacctcaagtgatctgcccacttttgcctcccaaagtgcagggattacaggtgtgagccactgtgcctggcctctgttagactctttatttttattttttgagacacagttttgcttttgtcacccaggctggaatgcagtgatgctatctcggctgcaacctcagcctccaaggtttaagtgattctcctgcctcagcctcccaagttgctgggattacaggcatgtgccaccacgcctggctaatttttgtatttttagtagagacgggttttctccatgttggtcaggctggtctcaaactcctgaccttaggtgatctgcccgccttggcctcccaaagtgctgggattacaggtgtgagccaccacgcccgggcctgttagactcttgattgccttccccagctattactttggtacatgtgaggccaaagataaattagtggcaactgaaagataaggaaatcttgaaggctgggagtccagatagaaagccctaatgccttccctctcctccactcccaatgcctttttaaaagtgatgatggatgtggcatcttggcctctcagaaaccagctggcctaatggcagggcttcctcactggaggagaagcattgagatcttcaacctaagttctcttactcaggtttctctgtctgaatgtcaagggtaggctttatttccttcagggcatttagtcctggattggtagcttgagtaattttgctcttgattgactccttaaccttccagggctcctctgacctcttccctctacttcccagtgaataccatgtttattagagattttatgtttggtagggggtagttaccatatgtcagtttaaaaatttcataagtttagcagtttgttgttttttttttttgttttgttttttttgagaaggagcctcactgtgtcgccaggctggagtgctgtggcacgatcttggctcaactgcaacctccgcctcccagatttaagcgattcccctgcctcagcctcctgagtagctggggttacaggcgcccactaccacacccaggtgattttttgtattttagtaaagaggggtttcaccatgttggccaggatggtcttgatctcctaaactcgtgatccgcccagctcagcctcccaaagtgctgggattacaggtgtgagccaccacacccagccaagtttaacagcttttgaaagtcttttttttttttaggctgggtacagtggctcatgcctgtatcccagcactttgggaggccgaggtgggcagatcacttggtcaggagttcgagaccagcctggccaaaatggtgaaaccccatctctactaaaaaattacttgggcgtggtggtgggcacctgtagtcccagctactcgggaggctgaggcgggagaatcccttgaacccaggaggtggaggttgcagtcagctgagatcatgccattgccctccagcctgggcgaccgacgagcaaaactgtctcaaaaaaagaaaaaaaaatcttttagatgaatttgaatactttttacttactatatgtatgccacactattagctaaaaggactatttttttttctttgctaggagccggtgaaacctgaagaaggcagagatatggcaaacaggattggcgcttttgggtacatggagtgttcagcaaagaccaaagatggagtgagagaggtttttgaaatggctacgagagctgctctgcaagctagacgtgggaagaaaaaatctgggtgccttgtcttgtgaaaccttgctgcaagcacagcccttatgcggttaattttgaagtgctgtttattaatcttagtgtatgattactggcctttttcatttatctataatttacctaagattacaaatcagaagtcatcttgctaccagtatttagaagccaactatgattattaacgatgtccaacccgtctggcccaccagggtccttttgacactgctctaacagccctcctctgcactcccacctgacacaccaggcgctaattcaaggaatttcttaacttcttgcttctttctagaaagagaaacagttggtaacttttgtgaattaggctgtaactactttataactaacatgtcctgcctattatctgtcagctgcaaggtactctggtgagtcaccacttcagggctttactccgtaacagattttgttggcatagctctggggtgggcagttttttgaaaatgggctcaaccagaaaagcccaagttcatgcagctgtggcagagttacagttctgtggtttcatgttagttaccttatagttactgtgtaattagtgccacttaatgtatgttaccaaaaataaatatatctaccccagactagatgtagtattttttgtataattggatttcctaatactgtcatcctcaaagaaagtgtattggttttttaaaaaagaaagtgtatttggaaataaagtcagatggaaaattcattttttaaattcccgttttgtcactttttctgataaaagatggccatattaccccttttcggccccatgtatctcagtaccccatggagctgggctaagtaaataggaattggtttcacgcctgaggcaattagacactttggaagatggcataacctgtctcacctggacttaagcatctggctctaattcacagtgctcttttctcctcactgtatccaggttccctcccagaggagccaccagttctcatgggtggcactcagtctctcttctctccagctgactaaactttttttctgtaccagttaatttttccaactactaatagaataaaggcagttttctaaacttcctgta

SEQ ID NO: 12 - DNA, 18170 bp, Homo sapiens
gtggagaccgaggcgatggcaaccaggagaagccaaacttggtcccccggctcgcggagtgcctgcgagcggtgctcatggcgctctatgagctcttctctcacccggtcgagcgcagttaccgcgcggggctctgctccaaagccgcgctgttcctgctgctggccgctgcgctcacgtacatcccgccgctgctggtggccttccggagccacggtgagcctgccccggccgctgtgccacgaggctccccgggcgcgctcggccagggccggcctccctaaccgcctccctaccgccctctttaactcagggttttggctgaagcggagcagctacgaggagcagccgaccgtgcgcttccaacaccaggtgctgctcgtggccctgctcggacccgaaagcgacgggttcctcgcctggagcacgttccccgccttcaaccggctgcaaggggatcgcctgcgcgtcccgctcgtttcggtgcgtggttcccgcctgggcctggggcagagtcggggatagggtggggatggggactggaatgaggatgtggggcgagcggccccggccctggggagcccagctttgatcctaaggactcgcgaacccgcaaaggtggcgtttcatctcctaggacctagggaatcgatcttctgtttcattctgcttctcccagatgtccccggcccccagaaagttagccatgctgtcagcgtgtgcgccctgacacagagtccagaagtgtgggggcagcctgtgtctgcccgggtcacacccgcgggcctggcctgatggagggtgtttgtgaaagtccatttaggagcctggaaggccgcgcgctgttaatgtagataaccccattctgtcgcggcgtttctgcatcacaccactataggaacggaaagggcagcatttttatgcagacctgacccctggaaaccaaggcgctgattggttaagcggccttcccagaacgcgctgtggccgagtcacgcctccctgggtttgtcccattggagactgcgccatcctgaagctgtcgggatgaaatggaagcatgttactgtctgtaatttatttatttatttttaaattttttcaccagtagagcgctgagaggaatctgtaatttagtatttgctttgagataagcgaatgcttcctttgtagtcactccttttcactcattttctgaaaacgttttcctttagaagtatgaaacttctggttttccttctttcaaattcgaatctcttcagacatatctaagatgattgccctacaagccaaccttgtatagctgaggagaaaagaaaatcagacttgttcccagcaactaaataaaattgtttttaaaaatccgattggtcgtataaataactgcaaaaaaaatagtaataggttgatgcaaaagtcattgcggcttttgccattaaaagtaatgacaaaaaaccggaattacttttgcaccaacctaatatgattcaggttacttttctcctattactttataaatgttcttatattctgattacaaaagtgcatgctcattctaaaatatgatagagttacaggtagatataatgacagaaattgaaggctcagttttgtatatgtatcaatacttattaatcagctgtattctttttgaggtttgctttgactttttcactattagggacaacatttctttttttcttttcttttttcttttcttttcttttttttttttttttttgagacacagtcttgttctgttgcccaggctggagtgcagtgctgcaattctctgctcactgcaactctgcctcctgggttcaagcaattctcgtgccttagcctcccgagtagctgggattacaggctaatttttggatttttagtagagaaggggtttcactatgttggccaggctggtctcgaactcctgacctcaggtgatccacccgccttggtctcccaaactgctgggatcataggtgtcagccactgtgcccggcctagggacaatatttcaatgaacaaggttttgactaaatcttatgcctttaaacatcaaattttgaggaattggaatagcagctctttgatgaaatggtataagtacatagaaaactaagcaaataattattaactgcagggaaatgaaaagtaaggaaaactgagaaccaaaatgttatcagagttgtgaataggattgacatagtcttaattatatgaacactgaatgtttactaaaaagagattttaactctattgggggtaatgagaaaggtattgggtatgtgataggggatggtgggaggaattgggggagagaagaagctaaatcatctttccttgtgggaactcaatagagaatgcctaaaactgagaaactgagaattttcaatgcaaatgttatctcaagacctggagatacatttctaaatgatcaggtaaatgagataaaaatatttgccgccagaaatgatagctcacacctgtaatcctagcactttggaaggctgaggcaggaggattgcttgagcccaggagttcaaggccagtgtgggcaacatagcaagaccccacatttcaaaaaaataaaaaattaaaaagaaatagagaagtggtacaatttgccctagcttttcttcttttcttttttttttttttttttgcaacagagtttcactctgtcagccaggctggaatgcagtggcacaatctcagctcactgcaacctctgccttctgggttcaagcaatcctctcgcctcagccttccaagtagctgggactgcaggcatgcaccaccactccgggctaacttttttgtgttttttagtggaaacagggtttcaccatgttggccaggctggtctagaactcctcaactctggtaatacactcacctcagcctttcaaagagctgggattacaggtgtgattacaggtgtgagccactgctttgaagtgaacagagtctggactggaactcagtatttcttatgctatatcttaaaatcttagcccttattgcaacaaactacttttattttctaactttgaacatagagccagactgacgtcagtctatccaggaaactgtccagaaggcaaaggaaacagtggttgttgattaaggttggaccaagtgctgggaggtggctttgcagtggctaattgggggaaatgctgaagtcacaaacagccttgcttctgctttggtcagctcatcctggacagcgtctctaagctccctacatgtttaatgctttggaagtctagtttttgttgtttttaatgagagaagagaaaagcagagtgactttttccccctcaagcctcaaggaggctgacatagctcttgaaggcatgtgtggacccagagaatacagggactgaaggttatagaaggattccagaggatgagtggagagtaccgtgtttctaagacacctgtttcttctcatccctgaaatcagtgtcttcctgtctgtggttatcaactgttggcaaggaggcaggtatggcatagttctcattgcttacacctgtgccggcatcaaaacatgcagaaggggcatcatttctgtgtaagaggtaggtgttagaaaaataaaaatgcaattaaaaagaaggggcatcagcaacctcagaggaaaccccagagacagtagtagaacatttttttaacccctgaattgaatggagagcaagtaagggaaagtttgagaggcttttaaaaacaggaaagctctccataatttcaaagtctgcttaagggcccagaccaatggcttttagtttcttttatgaattgtttgtttgtttgtttgtttgttttgagacagggtctcactctgtcacccagactggagttcagtggcgcaatcttggctcactgcagcctccgccccccaggttcaagagattctcctgcctcagcctccgaaggagctggattacaggctcctgccactacgcctggctcatttttgtatttttagtatagatgaggttttaccatgttggccaggctggtctcgaactcctgagctcaagtgatctgcctgcctcggcctcccaaagtgctgggactataggcatgagccaccatgcccagctgaatttttgttttttgtttttgtttttcttttaatgctgtatcaccaacatgtttgatggcacaaaggacaaagttgcatagaaaagtatgggttgttgactgagttaaagtgttactcaaaaggatgaggatgtaaagaagttttaggaatccctgaatcaatttattttgcctatatttttctttcttttcttttcttttttttttttgagatgaagtctcactctgttgcccaggctggagtgcagtggcgcaatctcttctcactgcaacctccgcctcctgggttcaagcgattctcctgcctcagcctcatgagtagctgggattacaggcaggcaccaccacggccggctgatttttgtatttttagtagagacgggatttcatcatgttggtcaggctggtctcgaactcctgacctcaggtgatccacccacctcggcttcccaaagtgctgggattacaggcgtgagccactgccccgacctattttgcttatatttttctaagtaaataaacatatctgtgtaaatatgtctaaatctaaaagctcttttagtaactttttaaaaagtaagtgattagaaaagtgtcatagtttaattggaaatgtttttcttttatcagtggtatataaaataatggttcattttataagtaatggtatcttagattgaaatacaaggctgagcactgtggctcatgcctataatctcagcactttgggaggctagccccttgagctcaggagttccagaccgcctaggcaacatagtgaggccctactataaaaaatttaaaaattagccaggggtagtggtgaatgcctatagtcccagctactcaggaggctgaggtgggaggatcacttgagcctgagaggtcaaggctgcaatgagctgtgatcgtgccactgcactctagccttttttgaccctgtatcaagaaaaaaagaaatagaaaaaaaaagaaatacaggtagaaaggtggaaaggaaccacgaagtggcagtttctgctttgctagagacccacaactggtgccaaagagtatttttagcttaaaaagaaaggagcacccggtgatgacaagtatatggtgaaatagacactggtataaactaggaaattaacctttaataaaagaatatgggccgggcgcagtggctcacgcctgtaatcccagcactttgggaggccgaggcggatggatcacctgaggtagggagttctagaccagcctggccaacatggtgaaaccccgtctctactaaaaacacaaaaattagccgggtgtgatggcaggttcctgtaatcccagctgtttgggaggctgaggcacgagaattgcttgaacccgggaggcggagattgcagtgagctgagattgcaccacccatactccaacctgggcaacagagccagactgcatctcaaaaaaaaaaaaaaaagaatacgacttaaatgaatgaaatgtacgcaaacaaaacagaaaccaaacaaaattccaacaaaccgtcagatgctgggaattcctgacggggaaaaaagtcacacatcaggatactctggaaacaatggcacttgaatttctggcaattcctgcagtcaggtggtgtgctggttatgaggtattgtctcagctccaaacccaccctcctacgctcagcttccaggttcctgctgagatgctggaaaccaccttcttcccctgcagcttcctgttaggttctgccagtaggaggcatgatgagccttgttctgggagtgcagaaaaaaagaaatgaaaccagtcaccactgccagggtgaagaaccactgtggatgccacaaacagggacaaccagcaaacaggaaggagcaggacgcctctcctaccggcttcaaggttccctctagtgcatgcttcctccaagctcagaggtcctggccccatctgggccgcggtcccttcttgaagtctgaggctcagctcttcgaggcctcttccctgaacctctaagttctatcagtcccacccgcttccccttcttctctagtcctaggtgtgggaaatgttccctgcagctactatctctgtgttgctgggatatcccctttttacgtcttcagtcctctaatacctatgggactatttattccctatgttaaattccctctggccaggtgcggtggctcatgcctgtaatcccagcactttgggaggctgaggcgggcagatcacccaaggtcaggagtttgagaatagcctggccaacacggtgaaaccccatctctactaaaaatgcaaaaatcagctgggcgtagtggcgcacacctgtaatcccagctagtcaggaagctgaggcaggagaatcactcgaacctgggaggtggaggttgcggtgagtggcgattgtgccactgcactccagcctgggcaacagagtaagacttcgtctcaaaaaaaaaacaaaaaaattccctctgactctgctcagtacatgcgtgtggatttcatgtgtatctctaaagggttatcctcctttaaccatgagaaatcttttcagttagagttcttatgagctattatagaagagccctgaatcaggagtcagcaaaccaagatccttgtcccacaaggtcctagtcccaattctgtcactgggtttcataacctcaccctcaatttatctatccatatacagggcatgagagtacccacatctctcctgggatatgcagaggaatcacgtgggacaatgaatggatataaaaattgttccaaagcctgtatatacgttgtagatataaggtggtggtgtgatatgtgaattctcttggctaagtaccagttggaggttagatagcgacctagaatttgtgttaaagaagtagtagcctttgaatgcctgcctttgttagctattgcacatatgttaaacttactttcaactaaatggaattaaataattgatttattcagtggtccaagtgataacagaggagcacagccaaacttcgccagccccaggagggtgagagtccagcttggtgacaggtcatttgtgggagacacatcctttccatcgaaacttctctcccccctctctccaccctgctctccttctcacccactctgccagatgcattgatcccacgggtacccagagcacatgtacctgattagcctggatccctcctctctgagatgttcctgcaccccatcacttcacttccttcaggactccaacaagttgggtcatcctgaatatttaaaaatttctgttaaattctttttgggtttttttgttgtttgtttgagatagagtcttgctctgtcaccaggctggagtgcagaggcacgatctcggctcactgcaacctccaccttctgggttcaagcgattctcctgcctcagcctccctagtagctgggattacaggtgcacgccaccatgcctagctaatttttgtatttttaatagaggcagggtatcgccatgttgcccaggctgctctcgaactcctgagcccaagcaatccacccacctgggcctcccaaagtgctgggattataggcataagccaccacgcctggccaatttctgttaaattttaccttcattattctctaattttagcctgcttcatttctgtcagcggcacttgtcactgttttctacattgtccatcgggaatgtatgccccattaggatggggactttgtctattttgtttaccattatagtctcattatttgaaatagtgcctggcgtgtttccaaaaagtacgtaacagatcaatgagtgaatttaacaagtagacactattgatggtgttgtgccaaatctgtcccccgcgaacttggaatggaaggatgtgcacaggcaagtatacagacgtagatgcctggtgctgctgtttttcaggaagatttgtccaacctgctgtcttcatttggaatttttaaaataattttagacattttggtcctaaaaagaggaccagatttgaagtcacctgatctcaaatcctgtcttcaccattacttgctgtacctctgataaatgccctaatctcactcatccttgattttgtcatctgtgtaatgggaaaatacctgttctgcctgcctggggctttacatttattgtaaagatcaaaggaaatgagcttttccccctcccacagtgtgttggagtctggattcttctggcagttgtctcctggccactatcctctgttgcaagttgagaaatgtgctcttttcttcctgtccaaccctaaagatctagaaggtgtggatccatcacagagagttacataagattttctacccagatcccaattgaagaaaatccacaggagacaaggcaggctcttttatttattttttattttatttttttgagatggagtctcgctctgtcaccaggctggagtgcagtggcaagatcttggctcactgcaacctccaactccctggttcaagcgattctcctgcctcagcctcctgagtagctgggattacaggcacgtgccaccactcccagctaatttttgtatttttagtagagacggggtttcaccatgttggccaggatggtctcgatcttctgacctcatgatccgcaaggcaggctcttttcatcctacctataatgactagtccatcattgcctcagtaacttgatcatcagccctggtagcagatatccctccccgaagctgatgaaacagggcagagaggaagtatccaagagaaaagggagggaggtttctctaaaacaagacctaagagaaggaacattattgtctagaaagaaagaaataattgaaagtttctgaaaattgagatttcttcatttcaaatgaccttattattagcctgaaaaagcacacacacaaaaaatctcttccttacgtaatagtaatggtgggaatcaaaatgaatccatagatggtggatccagatgggaatgctgctacacgatagtagaattgttctgggaatccacagtgggaaaggatcagttgtagcaaaaagatccagagttgtgcagagggaccatgtcagcagtgatcacttttcagtaaccgtgctttcctgatcatcattttagcatcactgtttggcaagactgtggatggtaggagtggataccagttttttttcactgcctacatatgcttcataagctgtattttgtcttttttcctctacagacctctgtcttctttcctttcatgcccgtaatttatcaaatagatatggttttaatactttgctgatttgacatagcttcctttttcatttcattgattgctactaaaagatgcacaaggctttcaggtcctcacacgaatgatgagataagatccaacatcaagaatctgaagcaaagacactcgtggtttcagaatctataaacagagtttggtaaggccgggtgcggtggctcacgcctataatcctagcactttgggagcctgaggtgggcggatcacccgaggtcaggagttcaagatcagcctggccaacatggtgagacccagtctctactaaaaataaaaaaattagctgggcatggtggtgggcacttgtaatcccagctcctcaggaggctgaggcaggacaattccttgaccctgggaggcggaggttgtagtgagccgtgattgcgtcactgcactccagcctgggcgatagagttagaccccggctcaaaaaaaaacaaaaaaaaatagagcttggtgattttctgttgagtttgagtttgttggaggaatgcataatgattaggattaggtgtttttctattttaacaagttgacttctagagacatagaagactattctgacatgctacttaaaatttccatacaaattcaggcatatttgtaaaaaagaaaaaaatatcagtgcaaaataagcaagatcacatgagacaactgaaaggcacaaatactatccagatgttttttgttattgcccatttattttggccagtgaacatttgaaaggcccagatatgaagttcagggaccatgcactttgtgtctctccccagtattaatgcacttacatctatctgcttttctcttttagtggaggagataatgcctgttgtgtacagcaagacagtgggtcattgtgtatttacagaagtgatgtggattcctcccagactcattagtgaccagggctgctgggcctgtttgggtttcctagactagagaagaagacaggaaccaggatgggaagacggacatgttacattttaagctggagcttcccctgcagtccacggagcacgttctcggtgtgcagctcatcctgactttctcctatcgattacacgtgagtcagtccgctgggaggctgtcctctcccttgtgtctttttagtagaccagagtccttcttctgatttctagaagacccgcactctagcgggccctcttccccatgtagtttgggatttaacttaggccaatggaatggttttcactagtcatattaactgacatgggctattaatagctcagaaggttctaggcagtgtttcctgcatggctacgctaggtatgtgagggcctcttaggtttcagccaagacaggtgactcttagcacccagagcccttcagatctgatggcggttggtattgttggtccttctaatgatttcagaggatggcgaccctcgtgatgcagagcatggcgtttctccagtcctcctttcctgtcccgggatcccagttatacgtgaacggagacctgaggctgcagcagaagcagccgctgagctgtggtggcctagatgcccgatacaacgtaagagcgcttctcattgtccagctcctttgtttctctgtgttactgttcattaagttctttaaagaggggaatgaaaagtagaaatgtcaggccaggcgcagtggctcatacctgtaatcccagcactttgggaggcggagatgtgcggatggatcacttgaggtccggagtttgaaaccagtctggccaacctggtgaaaccctgtctctactaaaaatacaaaaaattagccaggcgtgtggtgcgtgcctgtaatcctagctacttgggagactgaggcaggagaattgcttgaacccaggaggtggaggttacagtgagctgagatctcgccactgcactccagcctgggcaacagagcaagactctgtctcaaaaaaaaaaaaaaaaaaaaaaaagaaaaagaaaagaaaagtagaaatatcatttctttgtgggtggcaccaaagagggtctctgtagaattcttgccatgaattttttcaaactacagagaaggtacacgcatagttacacctagaagggaagagaaacaaaatctgtgtttgtcgaagaactaaattgcttattgcttttaggtccacgtgggtgcacacacacacattgtgtcttccatacacacgcttggtcacacgcaggatgtactccgaaggacactgtaaaatgatgatgtaaaatgttcatgtaaagtatttcagaaatattactagccatagtttactgaactcataacatatgccacccctgagtgcaggcgtttacctatatcatctcctttaatcatcatggcaacctctgagctgcctgcattgtcctttccccgcactccagccacttgtcccatcactgcccccgcttgctcccttccagcccccctggcctttttgctgttcctcaaacccaagaagcagctgccacctcagggcttttgcttttgccatttcctctgccaggcatccatgtggcttatcggaccatgccattcaggtccctgttcagatatccccaagcccagtccttctctgacctgcttctacagtagcagcccctccttccaccattcctcagccagactctccctcctgccgcctggcctactcaggatatgtgtttgtgtgtttatttgctgtctccctcagccttgacagcagtggcatctcaaatactatcacatccgtgcctagcacactgcctggcagatggtaagctcacagagatacttgtttaaataatgaactcattttgcagaagacgtaactggggcttaaagtgattaattttcccaaaggctcaaatcttgaaagataacagagcctgtctgtgtgcagaactcatgcatctaatcactcattcctcacttttattttatcacaatggggaccatagaagttgagctgaggtacttctgaaaatgaaaaagggatgttatcggttattacagccataaacccagacttgtagatatatagtgggttttactgttgctctgactataatcaatataagttgtaaagaataggaagctgcaacatatgaaatgaatatggcactttttgtttgaatgtctatatatcagattacattaacagcaagcaattatttcctcctttaagggattatatgcttatggtttgcattttatctatatctctatatttaaaagtgataaagaacttagcacccagaaaagaccaagaaaatgacaaaggagttggaagtatggtttcttttttttgtctttgtgtaggggtttttatttgtattttatttttatttttgagacagagtcttgctctgtcacccaggctacagtggagtggcatgatctcggctcactgcaacctctgtctcccaggcttaagagatcctctgatttcagcctcctgaatagctgggattacagccatatgccaccacgcctggctaatttttgttttctttgtagtagagatggggtttcaccatgttggccagactggtctcgaactcctggtctcaagtgatccatctgcctgggcttcccaaagtgttgggattagaggcgtgagcttccatgcctggctttttatttttttttatttttatttttttttgagagatgaagtctttctctgtttcctaaactggagtgtagtgagtggcatgatcatcattgactacggccttgaactcatggcctcaagtggtcctcctgcctcagcctcccaagtcactgggattgtaggcatgagccaccacacctggcgaaaatacggtctgttaaaataatttaaggaattctttctcccgctgagataaagaggggtattttaaaaatagctttaaaacctgtaaaacatggacactgaccccttatttccatccacagaaagaaagactgagagtaaatgggcttaaattgttgcaagagagtttattcatctttgaagagaagattattgatactgcagtaggccaccaagaacaagagggtgctctgtgggaccagcctgggtgggcagcagcctgttttattcatctttgaagaaaagattattgatactgcagtaggccaccaagaacaagagggtgctctgtgggaccagcctgggtgggcagaagggtagaaggaaaaggggaggagtctcccaggtgctcacaccacatcctcctcccgtgtcccagatatccgtgatcaacgggaccagcccctttgcctatgactacgacctcacccatattgttgctgcctaccaggagaggaacggtgagtcacaggtagagcccattcagccgctgctcaggactttcaaggttagtgggggcaacagagacaagcagaactggaacccttgtgatgaaaatgtcaaaacccgtgaatgctcaacgatgggagcaaatatgctgtccaggatttgtctttttcgtcctgatcttcagacctgggaccgcccccacccctccagcatcccatggtccagcaggctagtgatggttaaatgccatcattatcccaccactggcttagtgggtttctcttttaaaaaatataagcctaattgagttgttccccataccacacctatccacacctataacagatgccaaagacaaattgctgttcatgcttttcagagaaaaacagagaacgtgggtgactctccccacattagcagtccagcaggagaacaggagtgcccctgtttcctgccagaaggcacagtgtgcttattccttacagagctctaggccatggcatgtgtggactcggcacgtttgtctggtcggtggctgaggttttctctaaaagcatctacagtgttacttggcaagcagacatcatggagactatacacagacgtctcacaagggggatgactgcaaatccagtattgcttactgattttatggcatatactagtggcattattgcaataatagagggaattttaaaacaaaagtagaaaacattgccctacaaatcaactattttttcattcctttcattctttagccttctgcagatctttttatacagccattgtagtgtagaaacacattgggatccaagttacttttatttatttaaacttggaatataaatacttccccacacagctacaaagctgtgatactacttttagtggcagtatagtattccttcagttagccattcagcacatgtagaagaaactctttccaagttttttatgtattttaacaaaagtattttgactattattttaacaaataatgtgtgatcagctttgcacatgcaatttctctttccttccgaatgatttctttcagttctgaagcacaggataatttccaggtatcaaataatctttatagccttcaactgccagagtcaaacagccatcgtggttaatggttaatgattgcattgcagttaccaccgtcctgaatgatcccaaccccatctggctggtgggcagggccgcagatgctccatttgtgattaatgctatcatccgataccctgtggaagtcatttcatatcctttctgttaaagagtccatgttaaggctggatgtggtggctcctgcctataatttcagcactttgggaggccaaggtgggaggatcatttgaacccaggagttcacaaccagcctggccaagatagtgagtccctgtctctaccaaaaaaaaaaaaaaaaaaattagccaggcatagtggcgtacatgtgtagtcccagttacttgggatgccgaggcaggaggattgcttgagtccaggaattcaagcttgcagtgagcgatgattgtgccactgtactccagcctcggtgacagagtgagaccctgcctcttaaagcaaacaacaatttaaaaaaaatcaatggtagctcagttttcaaagaggaatgattccttagttgtctcaagtagtaacagacgtgggaggttttctcttggaaatcatgacagggttatagcctcataaaaatggctgcgtctttgacatcttaggctacatgtctcagaaaatgactgtatgtctgctattcatataggaacaaataattcatgtcttggtcctatttgtttccaagcaattcttctaggtaagaatcatccatatttatgtcttaataatcatatgatatcccttttatgctaaggttatgtgaaacattcttgccagtccctgtctgacctaaactttggtttaattttgacttaggtcgactaatggaaaatgaaaccaacaccaacactgcagagaagcaaacaaaagagaaggcattttaactggggtcttaggaattacaattccagagacacaaacctaggaagcagctaaattgtgttccgtacaggtgcaattaggcaggggctaagggtgttccaagtttacacaactggaagattttagaagatggatggatggctggttaacagctcaggatatctctagtccatgatcaatctagtttggcatagttgtctgtttaggaggttggtcatcaggcttggtatataaatagctcaaatcaaatgtggctggttttaccatttggccaagttcaggtcagcttccatctgggtgtgtacatgacagaggtcctgcctcctttcgagatacctctgccacagccaattccatcttggattttctcttcatacttaacaccatgtggcccttcactccttaactgtccatacttatcagccaggattctgggagatggtaaagttcgcctgggtgcagtatgtcagcatcctgcttatcttcctctgggtgtttgaaagaatcaagatcttcgtgtttcagaatcaggtggtgaccaccattcctgtgacagtgacgccccggggagacttgtgtaaggagcacttatcctagaaaggccatttctgaagactcagcaggaccgtggctgcctcattgtcatcttctgggaacatcttaggaccttttgaaagagcccagcggacacctgcgggcttgtgtgcttttccctcagagacaacggttctttccggttttgctctacacagttccgtatcttcagagctcctgcagaattgtcagggactagtttgtggaaaggtctgagagttcctggaggctataattagctttttgggttttccttctttgccttagcgttgaatttcaggagaaaattgcagtcagttcagacatcttggaaagagtcccatctctggtcaagcagagacttttcctctgttgaactgaggaacacactgtgcatttctaccttctgttgtgagccactcttactcttttcagggctctcttgtgacaaacatgccaatcactagcactttgcacccctgggcttctccatttcccattcacagctttgatttccagagctgaggcctttaactggagacctggaggggcagggcccaagggcaagggccgcattagcacaggcaatcagggagggccgctgaaggacacttggaccgtccacctgccccagcccaacagtcagtcatctgtcatcagctcagctgagcagccctggatctttgccgtactgtgactgggctctttgccctatttttccctctgtctgtgcccctggatggcaggctgaagtcagaggggctgtttcattctcagccccctcagcagcactgggggaagaaagcattgtcacaacaggttctttctggccctcacccaacagcctgggcacttggccctcctcctccttgacagccctcccccttcctgcaaaggacaggggcgacaggggttggtgttgggattggctcccgctgcctgacaaccacaagtttatttggaaggctagcgggaagcccagcggctggcgtttcccttgactaaggaacagggtgcccatcagagtggggcgggcagctttgggaaggacacaagaagcagtaagagtgtaaagaggatgctggcctgggcaggccagtccagcctggccactagcagaataccaagcagtccagtggattaccctcgtggctaagcaagtgtctgcaggagcagagatggctggaaggggcctctgcacacggaagatggcttgttcagcccattcacctcctgaggatgtgggcagtctcctccaagaacacatggagctgcttcctgatcccaagcaggtcattgccactggaaggacatggccccggtgatccatgcttcatgcccacccagaaacacacccctcagtgtgtgcctcagtttactttggagatcagttgtcgtttttagtgctcctttaggcttactaaaacagttttggaaacaaagctattttgaagtattcaagcagaggaattccctaacactgacccccttgtctttttttaatattcaggctgttttatatgcctaaatttttttcttaagatctaaacgaaaaatagtttcttgtttaaattcacataaggcaatgagatatggaaagatgacaagatacgtataaacattggtttgcattttattaaattattctaatgcaaatcttgtataaagaacccatgatgttttgtaactttctaattaaaatgttcaaaatgaggccgagcatggtggttcattcctgtaatctcaacactttgggaggccaaggtgggaggatcacttgagcccaggagcttgaggctgcagtgtgctatgattgcaccactgtactgtagcctgggtgacagagtgagaccctatctgttaaaataaataaataaataaataaaaaagtcaaaatggaa

SEQ ID NO: 13 - DNA, 82549 bp, Homo sapiens
gggtggggcctgagagccgactgaggccttgtggactgcagtgggccctccggtccctctaaacccccaggcctcctctctgcttggtatctgtttgggattgaagaccgttggttccataaacctccatgaagatgggagtctacctgaagaggtgggaagagaacttctgaggcagggaggagagcctggctcccccagcactctgccataactcattctgtggccacgagcaagtctttgctcccatctggaccacagtttatcttcccatgctagggatgctggacttaattttcaggatgctctgggggtctgacccgagaatgagagaggagtgtctggatatgcggtcactgcagggcagagggcagtgtagtgtggtggagttggggaagcccccaggacccagaggagtccaacagccacactggtctggagccatcaggtggggctgcaccaccccaggcaggagatggggctttgggaagtgggacaggctccgggctcaggcctgcggagcttggcatggggtgaggctgccccctggtggccaatgggtgtgtcacagcccagccttgccagggagcaggcagccaggctccacccccaggaggctccagaggggtcaaggatttgggggctggtaggccacagtgcatgcctctgcctccgaggggacctaggcccaggtctgaagaacggggctctcccctggacttagcgctatgcctggtcaggctccacctaatgccttgctcccgatgctcagggtgttgccccacctgtccactctaacccactgggacccagcccatcccatcagtcagagtcaggcccggccacccccccagggactcgtcctttaagccccagtccctcccaaggaggggaagtcggtggttgtggcagctccgccggtttctgacacctgagacttggtcttcggagggccctgcctgacactacattccatgtctccttgtccccagctgggtgaagcacaggcccaacgtccagcagggccagggcccggccgagctcccctcccactccctgcagtcttccttctctccctgatcccgtgctcctcctcgcccccttcctgcctcccccgctcagcagagcagctgcctctgtaggcagggcttttcctggctgctcctgtgctgctgctgtttgcaagtccatgcacttcttttctgtgtttgcatctctcctccctgggtcactcccccgtttgcctctgtctcccatcctcccccaggaagctcatgtgcctttgcagcctcccatgacgctgctctgtgtgcccaagacatcgggcagaggcacaggcttccttggggcagggggcagctgtttgccatccacctctcagctgcagtttcagatagtcccctggactttcttcctgcccatcctttctgactccactccagggaggccagacagaagtgtggccacaggccatgtggggctggagatctcagggcaggaccagtgaggagtgtggggagaaggcctgcagaagggtggcgtgtggctgccagtggggaacagctgtgggtctctgtgctcagcctgagggtcttggggagggcagacctgggtagaaatctcaggtctggtacttgcagctatgtggtcttgtcttcaccaagccagtttcttcagtggggctgctgtgagaattccatgtaataattaatgtaaagcacctcccacagggtctgtcttatggtagatgcccaataaatggcacgtcttactattattatcactactataattactcttaccctttccagccccagccatatcctatgtggagggtaacttccctacgggacagtgagatttcttctctatctctgtatttcttgatatttctttctctgtccagcaataattgttatatttagcactcatcaaggatgtactatgtgccagacagagctaggtgctcacattttctcattgaatcctcacagtgcctttatggagcaggtaatattatcatccccattttacagatgaggaaaccgagactcagagaggttaagcaacatacccagagtcacatagccaattgatgtgggagtcaggattcaaacccaggtctctctgactctactataccttgtctgcgccttcatctctgacccagtcggttctctacccaacccaaaccccacccctccccacacaggcacaagtgtcctggccctcattacccagcatgctcagggaccacatcctaccccccccaaattaggagcactcacccacctgtgggagtatctggcccaggctgtgcacttctctgacgggcagttcgtgctgctggctttcagccgcctgtctccgcacacttgatgctgtttctattttttgatttgagtttaattataaagcatgctgtctactcccctcttccagcctcccctgccactcccaacttgtccactggttccatggcatggccagtgccaagcacagtcaggcacctttccctccaggcccaggcctctgtcccagcactgctaagaatcaaggcagctcagcccaggtctgactgtggcatattgtgtacatgtatgttgatagtgggagaaggggccgggcgcggtggctgaagcctataatcccagcactttgggaaaccgaggagggtgggtcatgaggtcaggagatcgagaccatcctggctaacaggctagccgggcgtggtggtggatgcctgtagtcccagctactcaggaggctgaggcaggagaatggcgtgaacccgggaggcagagcttgcagtgagccgagatcgcgccactgcactccagcctgggcgacagggcgagactccgtctcaaaaagaaaaaaagaaaaaacaaaaagaaaaaaagagatagtgggagaaggaagatcaaataaaccattttaaaaggtcccttggccggatgcagtggctaatgcctataatcccgacactttgggaggctgaggtgggaggattgcttgagcccaggggttcaagaccagtctaggcaatatagccagaccctgtctctactaaaaatacaaaaaattagtgagttgggctggtcgcggtggctcatgcctgtaatcctagcactttgggaggccgaggtgggcggatcacctgaggtcgggagttcgagaccagcctgactaacatggagaaaacctgcctctactaaaaatacaaaattagctgggcgtggtggcgcatgcctgtaatcccagctactcgggagcctgaggcaggagaatcatttgaacccgggaggtgggggttgtagtgagctgagatcacgccattgcactccagccttggcaacaagaacgaaactccgtctccaaaaaaaacattagctggttgtggtggcacacacttatagtccctcctactcgggaagctgaggtgggagaatcacctgagcccaggaagtcaaggctgcagtgagccctaatccttgaccatgccattgcactccagcctaagcaactggagtgagaccctctcccttggccttcaagggtattatagaagaagggcaggaagttcaagttggaaggatgttctgtggaggaggacagtgaagaggctagccaaaaatcacatgtaaactggtggcattgccaacagcaggacccaggtccggggccctcagttaggggccaaggccgatgggacaggtccaggataaagacctagaagactcaggctgagggaagcagcacaggcccacacacagacacaggtgtagagcaggtcttcagacagccctgggctgcaggcagaagcagtgtgtccagggccactcccaccctctgccaagctcctcccccaacccaaaaggcagggacacccaggccccactgtcccctgaggccagagagatggtctttaaggtctctccccatgctaactgtggtcagctaggaccttcaattgggcctactagaaatcttctctgtcatccacagacctttgtcatacacacataccttgatactactccccgcttgcactcccagatggtgggaacagggcacacccatgcctgcagccatacctgcactgggtctctgaggtctgagctccagggagctaaggctcagcccctcctggggctctctgagccctgaggggagctgctggagacagctgtggccaacagctatcacaaatatctggaacccccttcctctctcctcccctccccactttcccagggaacttggggtccctggccaagaagcctgagggcttggctgagaggggagcccactcccacctgtggagactgaagacagtggctgagagggggtgtaggcgccaggaggagccagatggagtagcaggctctagggccgaccccacgctgggcttccaccatcttctgtgtgtccgcctgggccagagcctccagcagcaccagcaggatcagtgccagggtggcaaagtggcagagccccatggcagggagtaaggaccagctctggaagagagatgagctctgtgttacaggcaggtgaaccaaggcccaggctggctgggacttgttggggcagggataagagctgtcacctaaacctgcttctgccttgagccctgtgcataaggtcaagtgagtgcagctgctgggagagatgaggaggtagatttggtatccatggcttagggacagagatgacctctccccatgggccccttatctttcagagtacctggacccagagctgctctgtatggctgcacaggctgcacactgcataactcctggggcctccagttgcacagtttggtggatgacacctccatgaattgtgcaatgctgtacccctgcctatccaacttccccaaagtcagctgcctgatgggaaagatgctgaggtcagaggtcagggagcctaaggccccaggctgagggagaagggtgactgggcatggtccgagatctgatgctccgccaggttcctgggtcctgtctagaggagagagagcaggcagggaatctgccattccatgggaaacatgcccccttcagaccttctacccacagagctccatgccacagcttggctacaggccaatctcaagcccagctataacccaaagtttcttatcacagtcacccccaaactctaaacttagcccctgatccttccctaatcctgctcctcaagatgcttatcctccagccagcacaggggaaggggtcgatgctgctgaagggcctcccttctgcttgggctggctatgccttcagagacaggaactgctcttaggggtgggaggcagggagagagtcaggccctgccctgggaggtttctgggaggaaaaagctactgctgttccagctcccaagcatgcccaggccagtcacccacccccaaatggcagcccgtctgtggcatggggtggtagggacagccaaagacaggcttgaggcgagacaggcaaggagttgtagaggaagcagaggtggaggcaggccctgctgggtggggagccaccgtggaggcctggccttagctcactgatgagaattagctaagcctggaaagttttctctgtggcactgtacctggggtccagacctagggggaaggggatgtggaggttcaggagggtccaggctggctgtgcagatgcctcagtgagatttaggggagcccccacaggctttcagctgaggcagggcaggttggccccaagaccaggtaggaaagtctcccctcttccattttatgctttccacaccctcgcatcctagtccttctcttctctttggggtctgaaggatccaggtggggtgggggatatgggttgggggtcctacaggagaattgcctaggccaggcccttgggtgagaccctgggtaggttaagggaacccagcagtttggagagagggccaggccccctttaatcctcacttccagccacacacagccctgccaaccaatcctggaagaatccaatcctatgtctgcagcctaggccctcacctggcctcttccggccaaccacatccagctttgccccctgaggcctcacctggcccctcagctctggccggcaccccgcagttgctggtccagcctgcagagctggtgcaggaagcctcggttggggaagacccatcggtgctgcctcacggtgatcaccgcctggcgcagggacagccgctggtgcagcatgaggtaggccaggaccagcgtggcagagcggctcacgcccaccacacagtgcaccaggaccttggctgaggaagacatcctggtgaaaaaccctgtcccacacaccggcccacccacgggctgggatggggacccaagttcctttcctgaccctgccttgggtgcactctgtgatcctgagcaagtcactcagcctttatggacctcagtttcctgatcggtaaaatgggtagatcaacacctgttctgcctacccttgggatagggtccgaatttcttttttcttttctttcttttcttttttttttttttttttttagtagagacaaagtctcactatgttgcccaggctggtcttgaactcctgaacttaagtgattctcccaccttggcctcccaaagtgttgggattacaggcgtgagacaccgctcctggcctccaaacctttttaacacttcaagagctggcccctgtcgcctcatctcagattgtccctcccccaccttcagctcgagaaacatggaggaacttgcagttccttgaggctgccatggtttctgacctccagccttaccacatgctattccaaatacctgcaaattgtttcccctggtctcggtctgactaacttccactactcatccaccaggttttggctgagacacggcttcctccacaggctttcttgaccgctcaaagtattgcttgaatcacaaagcagctcatcttttttgcatattacccatggatacctttgtagagggaagtccccccaccttcccgatcctctgggcttagcacccccgccgtgtgctcccagagccctccacactggcccactcttatgagtagctctcactatactattcgcaatttggctgtctttccaccagttccaagagggcagggatcctgcttcttaaagtctggattcccagtatttagctcagtgccaggcacgtagtggatactcagtaaatagctggtgaatgaatggataaatagcaaaagaatgtcaaagtgtgttggatactaaaaagtcatgtgagctgtaatcttgtcattcctgtcacatagatgaggaaactgaagtccagaaagggacactggcttgcccagggtcacacagtgagggacacagctgtcttctaggatggacacaaagccaggacaccagcctccctgggctcctatgctgtatcctgagtatttgaagatatatttcttttctagttaaaagtactttgggggccgggtgcggtggctcatgcctataatcccagcactttgggaggccgaggcagacagatcacttgaggttaggagttcgagaccagcctcgccaacatggtgaaaccctgtctctgctaaaatacaaaaattagccgggtatggtggcggatgcctgtagtcccagctacttgggaggctgagacacgaaaattgcttgaagcccagaggcagaggttgaacccaggaggcggaggagcagagatcgcgccactgcactccagcttgggtagcactgagactctgtctcagaaaaaaaaaaaaaaggagaaaaaaagtactttggggcagacatctaggtaccaaatggtgctttcccaaagttgagtgttgcagagaaagagctgttctgctgtttgggagaaatggctttcagcctcagggttgctcctaactcatggcatgaccttgtattccaggcctcagtttccccatctgggaaggaatcgggttcgacaaaatgctggagcactaagcagaggacttttttttggcggggggggatggagtttcgcccttttgcccaggctagagtgaagtggcatgatctcggctcactgcaacctccgccccccatgttcaagcaattctcctgcctcagcctccagagtagctgagattataggtgggtgccaccatgcccggctaatatttgtatttttagtagagacgaggtttcaccgtgttggccaggctggtcttgaactcctgacctcaggcgatccacccacctcggcctcccaaagtgctaggattacaagcatgagccaccacacacggcctaagcagaggatttttaaaaagcagggatgggagggcactgatgactgagaggaaatgaggcatcctccccatgaatgagcaagatgggatatgggcttggaccccaagtcctacccccaggcgtgttgagggcacggtggatgaagtcagccgcagaggagaagtaggcactgatgtcaaaatcagggaggtcgtgggctggcacccccaggtagctcacactgctgccgtagaagtcagggccgccctgacagtagaggcccttgtgggcggcgttcagcacgtgggtgatgcccagcttccacagctcaaagcggttgtttgccgtggccctggggagggcaggaagggcacttgatgccggccaagccatgggaccaggagggaggctgtgcctggccccctgctgcagagggaccgagccattagggtccaaagagagtccaaccccagcaagctccaagtggggtctgactccacagccctatacccagagccccgcactttctggtggctgagccggcggtgtgtgtgtcgggggatctttagaccctctttgcttcctcaatgcatctgtccctgccttggccaggacaggaaggaagggattgcttcagccctggaacctggctgcccctcccttcttgccccatgtcctcccacgcatatccgtcctctactggctaccacctcatacctgcttctaacctacaaatgtttagaggcaacaccttctctgattcaccttcagtcaggcttctccaccgtctgtatccagaggagggaggctgggcccagaaacagggggctctctgtctaccttatctcatgccccaaatactatttcctgggcctctgcctctacacttgacagttgtcctggaaatgtttcctggaactcctgggagactccctgctttcaggcaggcgaagtccctgctctccctggtggccatacctggtcactgcactgacctcagcacccccgggggtcctggagaaggtccctggcctgggatggtcagagcagagctatttctccttgtttccaccctcctgtgtctggtaaagcgaccaagaactgcctctccacgtccccacccccatgccccttggccagctaccactcacgcatctcctatgaaaaggttgggccaaacttcgtccacacggctgcaagaagacttccctgcccgcaggagctcctccagctccaggatgctggggcaaggcgtggctttgtcctctccccccagctctgggagagaggtctcagccatgggccagcccgcccacccctctgcctctgtggtcactcctctctgcctctccagtgtcatttctccttcccagagattgacagggacaggtgacagaagcaagtgactcagcaagtcacaggggcctctggagtggacaagaccttttcctccccaagcctccccccacccccaaactccatgagaacacagaatcagagagacctctgcaagtcagctaccaccctgaacctcagtttcttcatctgtaaagtaaggataatcacacctacctcagagaatttgaggattagatgaaacaaaggacatgctgggtctgacacatagtaggtgcttagaaacatctgtggaattagtagatgtagagccctgcctaaggctattaggttctgaggactgagttaaagtagagatccagggtgcagaggaggtggctggttccaaggatgaatgatagaaagaactgaaagaagtgtacagtctaggtgggccacaaattgggcaggagctggattggatgtctgttggatgagtctctgaattacggaggtcagggacagttttctgagttgtagagtcagagaaatatgggtaagagacatggagagcttcctttaaagggtgcccacaagattcatggggggagggggaaggtgtttttttttgttttgttttgtttagacagggtctcactctgtcacccaggctggagtgcagtggcatcatcttggctcactgccactaccacctcccaggttcaagtgattctcctgctttagcttcctgagtagctaggattacaggcatgtgccaccatgccacactaatttttgtgtttttagtagagatggggttttgccatgttggtctgactggtcttgaactcctacctcaagtgatcagcctgcctcggcctcccaaagtactgggattacaggtgtgagccgccgtgccgggccaatggggcaaggtttgaacaatggtcctgtagtgaagatggctaacttctcagaagagaaggctgaagagggccttgtatgtcaaatggggagacgggaggtgagtgttgccctagactttgagagccaaaggggctaactgtcatcagaaacagtgggagggagattcctctgcctataagggctttgggtcccaaaatagaaactgagaaaggtcaacctgtccttctgccagagctggttatcagcaagagagatgagatgtctcaccctctctcatgtgacttctcagtggccctaatggagctgggaagggtatgagctgcagtggggaggttcccagctgcccttggccttaagaccagtttgaagggaaaggccacaccagggcatcccatggaagcagtctacactcatgtctatcccattcagaaccattgaagtcggcccggcactgtgtggggaggcaagaccaaggaggggctcgtgtccaggttacagctgggtttggacttggtttatgccaatgctagacctggcttgggaggagaccttccctcagggtggtgcagcatggtggagtgaggaaaatacaggatctgatgttagagagatttgggttggaatatcagtttgcaatatgtcaggcagtatgtttctttacttttctgtgctataggatcccccttgcagaattagcactaggattttttttttgagatggagtttgctcttgtcgcccaggctggagtgccatggcgtgatctcggctcattgcaacctccatttcccgggttcaagcgattctcctgcctcagcctcccgagtagctgggattacaggtatgcaccaccacgcccggctaatttttgtatttttagtacagacgaggtttccccatgctggccaggctggtctcgaactcctgacctcaggtgatcccgcctcagcctcccaaagtgctgggattacagacgtgagcctccgctcccggccttagcacaaggattaaatgagatgtttatatggcgtttggcatagacactgtcaaagagtaaatgggcaataaattataacaatgatcattgggggctggctattggagaagagctggctctctccagaggaattcggattacctccttctaggccctaaccccatttactgatcccacaggccccgccccggctccgctagccccgcttcctcctgtcgctttggcctccggcatgacgcatgcgccctcgggctcctccgcggcagcatctcggttctcctctcgggcccatctggagcctcgcgtcttttccagtgtgggccccgccccctgccggtagaaccccgtccccggccggtagggccccgcctcccgaagcagttccggttcggctccgagcagctgccggcgcggcggtgacggcggccgggacgatgcctgcgcgcagtcgccaccgcccccgcctccactccggctccccgccccgggctccgcccccgccgcttgaggcgcttcactccggcgaggcggggagggccccggactccgacggcggctcggacgccgactcggaggtgggtccggggagcccgactcggaccgcggaggtgagcgggagctgaggctgaggagaggggagcttggggggcgcctgctgccaagggtgagtggggagtctgggatggagccgggggctgccgagggaccgcgacctggaggggccccggggagacggttgagggaaccgggatagtcagctctggaatggaatctgaagcaaatggaggttgtcgaactgagggcctgaaggctgagggataagtggaggccgaggaacgagagggagagagcgagagggggaggcttgaagagcccagagcttgggggcttttgaaagctgcgcagtgggggaaaaagatcgaaggtcctgcgggaatgtggacccggaagaagagatgctctgggtttggcagcggggatgaggagtcagaggagcaagacctgggccggtgttcccttcccagggcgagggagggcgatcggggctgggactggagccctctcatggggttctcctcttacggagccctcttatccgcctcccaccccgggtggggctggtggtgatggagggcaggatttaggtttgactagaaggaggagggctgttggatgggaaatcgtctggcctcaaggggtgagggaggcactgaaaaagagaagtgtggtcaagaaagaaaaggagcccttggggatctaattttgggctttggcatttttacaggtgccttttaaaacatcaaagatcactagggcaatgtacttggatcgtggggctttctcgttcgtgcacagtggatcattttaagaatcttgggtggaaggggcggtgtgaatcactgatttgcctaaaggactgggggaagtagtggagaggaagtgatgtttgaagaaggtagtggaagacgtgattctgaaaatgaagatatcatttggatttattgacagtaatggtgtcctttttttcattgtaattttttcgtagctaagtttaaataccagacatgttaagatcctaaaaatttactatattacctttaagttttaaaaacttgaaacaagactttggatactcagattttaaaaattaaacttgaaacaagaatttggacacttggattttacagatactcaacatggactggttccactttcaaagttttaagttgacacatgtatttgccacatagtaaatgtatggtcaatgcaagtttctgggtgaagggggcacagtgaacttgccacagtctaggcgcaataccaaatcttcctctcactgataaccccaggattggacttatctcttgaaaattggagaggtacctttgactgattggcaaaaccaatattgaaatactattttgcaggtattgtgtgaatagtatttttagtagagtgatttggaaaaataaggacagaggatgcttgtagttggcagccaacacaactgggacaggtgggtatacagatgctttttatagaagacatagttccaaaacataattatgccagaaaaagaatgattgcaatatttatattcactttagtagagataaattgacttccttttgtgattgttaagtcataacatggttccatgaagtctttgactttagccacatgtctcatatgttttacaactttttatgtgattataggtttgtaaagttgttggccatttcttttctcttccttcttttcttttctttcctttcttttttttttttgagacagagattcgctgtgttgcccaggcttaagtgatcctcccacctcagcctcccaagtagctgggagtagctgggactgcaggtgggcgccaccatggctggctaatttttgttagcatcaagcgttttctaaatgcttgattaaatctaaatggatatctactgtttaatcttcatgagatgataatttgatttgcaacagcttttaaattagtttatgtgtatgggctatgtgacataccctcagatgcacagtggaatagtaattgtttcttcaaaggatatgtgaattcttagctaaaaatgctgagattgttaaagtattaattcccttttctttaacttaatacaaattatcttcagttgaagtttatgtaatattactgtttgttggttttatctttagagtgagatcctctggagaccttatcttcatacttagttgtgaataaaagtcatggcatgtaaaaatttgctgaactgcaatataagaactctattaagattacagcttaatgttattgcaaaattaaagagaaactgttagatggagttgtacaattaacatattagcatgtctaatagttttttaatttttgtttccctttgtcagttctcacacccattgaataaagaaaatcagtttttggctaggtgtggtggcttactcctgtaatcccaccactttaggaggccgaagcaggcagatcacttgaggtcaggagttcaagaccagcttggccaacatggcaaaaccccatctctactaatactataaaaagaattaatcaggtgtggtggctcacacctgtaatcccagctactcaggaggctgaggcaggagaatctcttgaacccgggaagcagaggttgtgagctgagatcacaccactgcactccagcctgggcaacagagtgatatgtctcaaaaaaaaaaaaaaaatcggtttctctaaggcagaagaagccatcatgactgcgatggcagaatatgcagacatatttaggtaaatcagttttgatttcagtaccataaccccccttctgcaaaagcttattcacattgcacagttgcttataaacatttttttattttgttaatcattagatcctcaatacttcttcaaaactttgctgttactgattaagacattttcatggcttttctaagaattgaaatttgaacactttttttgagaaacttaaatcacagatgtttccatgaatagtattattattgttttataagaatgccatgttaacaagctattctttcaagatttttacttccaggcctgatgtaatatatggtgttaattgttgggtgtacctagcatgcccgttaatttatggatggaaatctttcctgtcttcagattctacccccttcatttttcatatgccagtggattgttaatgaactaagattgaattcactttttaattttaaagcttctgtagctttgattctctttggacatcaaactgatttatacgagatatgaatacaattgcatattctgctaaattacctatgaagctcttttgaatgattgtggtatttggtgaaaaaatacagtatgagctaatcaaaattcttttaagggatttaggttatagaggaggactatactatttcattcccagattagattaaatgttttacttatttgcagagatgacaggggagagccttgattattttcacgtctcatgtatttatatttgtttacaaataaagagttacttatttgcaaaatgccgtatctttaatacttgcttacatgtgattttgggaattcttttggaaccagtttttgttcttgtttttgttttgctctaagggtatgatgtaacacattgaggggttaatagtagggcaagaacagagaaagccatttgacaacagatatcatcaggacagtgatgcttactttaggtcttgtggttttcttggccttgagaaatcaagatgttaactaaaaataggagagcatgggccaggcacactgggaaaacagattggtgtttacatgctaccgctgttgcttcctggtaatttgccatatgaatgtgtgggtatggatttgtaacagacctgtgatgtgaatattcctgaaccccctcctcccatacacacagtaccatcatcacagatctgaagcctaacctttagctgagttcagtgacttcatgtttccgtattgaaatgttctgttattgggtcctcacaatactatagaatgtaacatactgcgggcacggtggctcacgcctgtaatctcagcactttgggaggccgaggcgggcggatcacgaggccaggagatcgagaccatcctggcgaacacggtgaaaccccgtctctactaaaaatacaaaaaaattagccgggcctcgtggcaggcgcctgtagtcccagctactcaggaggctgaggcaggagaatggcatgaacccgagaggcggagcttgcagtgagcggagatcacaccactgcactccagcctgggcaacagagcgagactccgtctcaaaaaaaaaaaaaaaaaaagactattaactaagaaaaacttggttataatagtttcaccacagtgtttcaccataaaacaatgttttatgatatgtacctcagaaaagagtgttgtggggcagggcagtgaattatatttatatttgtctaagtattttttggtagttttttttttttaaagatagggtctcactgtctcccaggctggaatacagtggcgcgatcatggcttatgcagccttgaactcctgggctcaagcagtcctcctgcctcagctttctgagtagctgggactataggcgtgtgccaccacacctggctaatttttttaaatttttcttttgtagagatggggtatcagctatgttgaccaggctggtttagagctcctggcctcgagcagtcctcccacctcagcctcccaaagtgctaggattacaggtgtgagtgtcttaaatttttgaagtgcatttagttaagcttatgagttgtggcagaggacaagaggtagtaacatgagtatctgttatcttgatacttgttctgttgtcttgaaatttttgacagataaattctagttggaggtgagaaccatggattctgctaatttagggccttcctataggttaactggtgtcactgagtttttggaaatacttgcaaatctgttttagtttggaactttgagattaaatggaattgatgtcagttccatcaatataatattagcatgaaagccagagatttccaaaaccatacattaaaatttggctgcaaatccaatccattttcacaatatttaatggagtttgaagtcttgagccagtttctcattttccattatattgattagattttggatgtagcatatttatttatttatttagagacagagtctcacttcgttgccgaagcctggtgcagtggcgtgatgtcagttcatagcaaccttcgcctcccgggttcaagcaattctcccacctcagcctccccagtagctgggattacaggcgcgtgccaccatgctcggctaattttttgtgtttttagtagagacgaggtctcactatgttgctcaggctggttttgaactcctcggctcaaggcatccaccccccttggcctcccaaagttgggtttacaggcgtgaaccaccgcagcctgccagtgtagcatatttaaaaataaagattttaccagctgggtggggtgactcatgcatgtaatcccagcactttgggaagctgaggtgggtggatcccttgagcccaggagtttgagaccagcctgagcaacatagtgagacctcgtctctactaaaaatacaaaaattagccgggtgtggtggtgtgcacctatagtcccagaactcaggaggctgaggtgggaggatcacctgagcccaggaggtcaaagctgcagtaagctgtgattgcgccactgcactccagcctgggtaaagagtgaggccctatcttaaaaaaaaaaaagggtgggcgtgatggctcacacctgtaatcctagcactttgggaggccaaggtgggtggcttacttgaggtcaggagttcaagaccaccctggccaacatggtgaaaccttttctctgctaaaagtacaaaaaaattagctgggcgtggtggcacgtacctgtaatcccagctgcttgggaggctgaggcaggagaattgcttgatcccaggaggcagaggttgcagtgagccgagattgcgccattatactccagcctgggctacaagagtgaaatgctttctcaaacaaacaaacaaacaaaaaagattttaccaaattgatatgttaaactgctagcctggttagaataaaaattagaattttagatacttagcttctttactggtttgctgtggcattgcagccaggtcaggaaccctttaccaaatttatcaccaaagtcctatcatcgtggaaaaatttttggtataactgagaatataaaatggacggtaatatctgtcagattcttactcattgaggggagacagttctggatttggtgtagataacttggtgcagcctgatagtagaagttagtttaaaggctatttggaaccagaaaaagatgttatttggtatatatgacaactttttttgagtgaaattataagagttcacggttagagcagcaaaaaagtccaagaactgaagtgcagccaagagaatgatgatgtaactgaggagggaatttaattcttttaaagatgctgccctaaattctactgctcagaagtgggacataacaaaacagaaaatcaccactaaagagtttcaaaatggatggtaggagttagtgcaaggtctttgaaactgttttgtaattattgcagattttatcgatgttttggaaacaataccctgtgcttgctaagaaaatgcaaaataggctgggcacagtggcttgcgcctgtaatcccagcactttgggagggtgaggcaggcagatcacttgagatcagagttcgagaccagcctggccagcatggtgaaatgctgtctctactaaaaatataaaaattagccaggtgtggtggtgtgcccctatagtcccagctacttgggaggcagaggcaggagaattgtttgaacctgggaggcagaggctgcagtgggctgagatcacgccgctgcattccagcctgggcgacagagcaagactccgtctcaaaaaagaaaaagaaaaatatctttctataagtataaagagaaaagagtagtttttgtttgctgaatgaaaatgttttcatttatggtaaaaattttaaaatagtatggaaaaaagttggataatcccaaatactataaactacagagttattaatcacaaagtttagccatatatgcccaaattaaaccttatcctcctacatcatagtttaggctttttgctttcataagaattgtttttatgttctggtttatggatctgcaaacatgtagtctttattatgtggatattagataagctaaatgtatttgatttagctgtatttcagcttcagtgcatctataatatataattgccctaagaaaaatttattaactctagctttatataatgtttgaagtctcttcctcagtgtttatcttgggatatggatcttaatttttttacgttttatacatcatttggaagctgtttaacttttaaattttgtaaactaaatcagtaatgatttgttttttttttttaatttgagacggagtttcgctcttgttactgaggctggagtgcagtggtgcgatctcagctcgctgcaacctccgcctcctgggttcaagcaattctgcctcagcctactgagtagctgggattacaggggtgcaccaccatgcctagctaatttttttgtatttttagtagagacggggtttctccatgttggtcaggctggtctcgaactcctgacctcaggtgacctgcccgccttggcttcccaaagtgctgggattacaggcgtgaatcaataataatttatacaaatagcacatattgtatttatgagtcaagttttatcagttgtgaattcctttaggggcatttgaatgtagggcttttaaatacaatcacagaatttagaatagaggacagttgcttcagctggttgtactccaatatttttgatgattttctgcacacacatgcacacacacgtgcgcacacgtgagaagtgaaactacaagaaaaatccagcatgtttaagtcactgtaatcaccatctgaacatggattttgcttctgtaaaagtaagcatattgtaaaggtttcattttgttgatatattctctgtattttaaatattgttagctgggcacggtgactcactcctgtaatctcagcaccttgggaggccgaggcaggcggattgcctgaggtcaggagttcaagaccagcctggccaacatggtgaaacctcgtctctactaaaaatacaaaaaaattagctgggcgtggtggcgcgcatctgtaatcccagctactcgggaagccgaggcaagggaatcggtttaacctgggaggtggaggttgcagtgagccgagattgtaccactgcactccagcctgggcgacagagtgagacactgtctcaaaaaaagtaaagattgtccagtgatggattagaggctattttggtctcttgtgtgttggtataattaagcccagtggaatagctgtgtctttctagtttttagtgcctatcactttaggaagtttcccaattcccaaactgtacagaagtgctttcaggtatcaacagtaatcagttacatcactgacatactttttattttattttatttatttatttttgaaatggagtctcgctctattgcccaggctggagtgcagtggcacgatctcggctcaccgcaagctccgcctcccaggttcatgccattctcctgcctcagcctcccgtagctgggattacaggcgcctgccaccatgcccagctaattttttgtatttttagtagagatggggtttcaccgtgttagccaggatggtctctatctcctgacctcgtgatccgcccgcctcagcctcccaaagtgctgggattacaggcgtgagccaccgcgcccggccagcgtcatactttttaaaatgttggtgagtggtatgctcctgtggaaatatttattaatagttaaattttatgttaagtcgttatatgagcagtgcatattgatgtgtagagcaatgcattgagtaactagaacctctattttatattattgtttctcagtttatgtagcttaattacgttgttatgttgaaaagtaatttccatcttttttttttttttttttttttttgagacgaaatctcactctgttgcctgggctggagtgcagtggtgcaatctcagctcactgcagcctccgcctcccaggttcaagcgattctcttgcctctgcctcccgagtagctgggactactgtcgtgcaccaccacacctggctaatttttgtatttttagtagaggtggggttttatgttgaccaggcttgtcttgaagtcttaacctcagtgatatacccacttcggcctcccaaagtgctgggattataggcgggagccaccacacccggacttttgagcagtttctgtttgctaagcattattataagtgcattattgtaagtgcattacatgtataattccatgcaatcttcacaacaagcctatgaagtaggaattctcctcattttacagataaagacagtgaggcccaagaaagttatgtaacttctgcagggtcacataactgtgagtggtaaatcctcagtttgaacctaggcagtttaattctagagccagtactctttactttctgggctgtatatcagatgttgttggcaaatagcttatttatctgaagcttaactctctagccttagtttcttcagctgtaaattgaggaattgtactagatctctcaggtcacttccatttctaacctaagaactctgtcatcctgatttacaaaacacaacacgtttaatgtttcaaattactttctgtttgtaatctctggatcccttatgagataaaggttaagctgtttccaacatcacactgttaatgggtcatggaactggatcagatcttttctgggacttcctggttttgctggttgcctcatgcatatacttagtgtgtatatgcatatatgggttaataattgaatttaattgaccttcttaatttttttttcttcttttttttgactgagtctcactttgtcgcccaggctggagtgcagtggtgcgatcttggctcactgcaacctctgcctcccaggttcaagcgattctcctgcctcagcctcccaagtagctaggattacaggcatccaccactatgcccagctaatttttgtatttttaatagagacagcatttcaccatgttggccaggctggtcttgaactcctgacctcaagtgatccaccctctttggcctcccaaagtgctgggattacaggagtaagccaccatgcccagcgactttcttaattttctatttatatctgtttaaatgagatttgcttcaaacagtgaaaaataatactgctttcattttctttcttttttcaaaatcatatcacatcattttcttaaaaaaaccttttctctctgattataagtattacattcttattgtatggaatatagaaattttagaaatttttaatgtagacagtgaaagggcccattcaaggagtaaatattactagtttgatatttatttatttaaaaatatacacatataccatatttgctattttttgggacattgtgcttcttttaaaattttctcagtttttattttgaaataattataggctgggcgcagtggctcacgcctgtaatctcagcactttgggaggccgaggcaggcagatcacctgaggtcaggcattcgagaccagcttggccaacatggcaaaaccctgtctccagaaaaaaaatagaaaaattagctgagcgtggtgggggcaccagtaatcccagctacttgggaggctgaggcatgagaatcacttgaaccctggaggcagaggttgcagtgagctgagattatgccactgcattccagactgaatgatagacggagactctgtctcaaaaaaaaaaaaaaaaaattcttggctgggcactgtggctctctcctgtaaacccagcaccccagcactttgggaggctgacaggaatggatgcttgagccgtggagtttagcctgggcaacatagcaagaccccgtctcttaccccttccccaaaaaatcctcctctgttagcagttttctgacaatttgtattataaatgggtatttgcgataaaaattttgttagatgctttttttatttatatgctcctgtgttttttctcctttagcaggttaacatggtgagttacgttgtttgattttcaaatattgaaccagccttgcatccctggaatgaaccctgtttggtcatgatatataattaattttatatattgctgaattctgtttgctaatatttggttaagtatttttgcatctatattcgtgagggatattggcccttctacagacaccatctccatagtgccaggtggagaagggttaagttttgtaccttgcttgctgggaaggaaatggacacctcatgcttgcttcccaccccacctcaccccaccccaccccaccccaccccaccccaccccaccccaccccaccctgtgcagggggttgggcgggtaaaggagatgagggttgtgggtggctttgttacctccgatataccactgagtggtgttaatcctgagtctccagcaggcttcctctggtagtacctcggcaaggagcaggaggggtgcctcataagtgctgtttgggtttgaagtccaagttccccaaatggactcctctgacagcatgttaagagagggggagagacttgttactgctagacaatgatgacaatcccagctccctacttggtcttctctgataccaccctggtgtggagagagatatggccggattataacctgacaggcttaaaaatcaaggctctccatttggcctttcctggtgagggtgggagtggaaatggggctggttttttatgtggtgtttggctggaatagagtgggttattgtctaaaagtcttacatcttgctaggctgtctctttttctggtcctttggtttttcttttctttcttttttttttgaggtggagtctcactgtctcccaggttggagtacagtggcatgatctcggctcactgcaacctctgcctccagggctcaagcgactctccagcctcagcctgagagtagctactcagcctcagagtagctactcagcctcagagtagctgggactacaggcacactccaccgcgcccaggtaattttttgtattttagtagagacggagtttcaccatgttgcccagggtggtctcaaacttttcagctccagcgatccgcctgcctcagcctcccaaagtgctgagattacaggcgtgagccactgcacccagccggtcttttgttttttcttggagctttttttatctgcacctttgacatttccaggttgctagcttctctagtatccactttgggatatatatggcaaaataaacaaacaaaacacccaaagagctcactactgtgttgttccttgggtcccaaggtgcctggccagtcagtcttcctcttcatttctcagagtcttcttatgtttattttatatataatgtccatagagtaataggaaaaagtatgtctactccatcttcctgcaagcagaaatccatttattttttaaaatgtacctgtcagaggccaggcaccatggctcatgcctgtaatcccagcactttgggaggccaagacgggcagatcacttgaggtcaggagttcgagagcagtctggccaacgtggtgaaaccctgtctctagtaaaaatacaaaaattagccaggcgtggtggcgcacgcctgtagttccagctacttggaaggctgaggtgggagaattgcttcaacccgggaggcggagattgcagtgagttgagatggtaccattgcactccagcctgggtgacagaacgagactccatctcaaaaaaaaaaaaaaaaaggtacctgtcagaaaaatctagagagcaaaacggtacacatactgaagagtagctctctcttctgttcctctactttttagaagctgtttccttcattctgtcttcatgtctgtcattatattccatcctgtctcacaatctgttttacactcttaagacaatttttctttctttttttcttttttttttttcctaagatggggtctcactctgtcactcaggctggaatgcaatggcacagtcatggctcagcttcctaagtagctgggagtataagcacatgccagcacagccagctaatttttttgttgttgttgtttttgtttgtttgttttttacagagatgggatttcacgatgttgcccaggctggttttgaactcctggcctcaagtgatcctcccgcctccagctaccagagtgctaggattataggtatgagccaccacacctagccaattattctttctaaaacacactctgattatgtcatcctctttttcagctatctgcagagaatcccattgtgtgtagaatgtttttaacttgacagaggtttccatggctctctcaggtcctcgtttccaagaaggaacaactgttgtgtctaaaagggctactgccttatgcagcctatttgctgcatgaactgtgcatgatgtatgcccagggacaagccttttaagaagttcatcatttgaggctgggtgtggtggttcacacctgtaatcccagcattttgggaggctgagacgggaggatcacttgagcccaggagtttgagaccagcctgggcaacatggcaaaaccctatcgctacaaaaaaaagtacaaaaattagcccagcgttgtggtgcacacctgtggtcccagctacttgggaggcttaggtggaaggatcacttgagctcaggaggcaaaggttgcagtgagccaagattgtgccactgcactccagcctgggtgacatagtgaggccctgtctcaaaaaaaggaaaaaaaaataaagttcattatttgaaacatagtcgagcccacagctatcagggacatttctgaaacaagtaccttgggcacctatgtgcttccaaagctgtatgtgaagctacataactacatgagttgtgccattcgcagaaaggtagtcaagaatcgaacttgtaaagcctgcaaggaccaaacatgtctacctgacttagacttttgagtgctgccccatgacctccaccaaagtccgtataaggagccgactccttaaggactgaagaaaaactatcttctggaaaaagataaagtggagattatactaaaaacaaaaacaaaaaggttttcatcatctggccccagtttatattttcaactttttatcttgttattcccctgtgccttttacatactgatggttcaccactgtttcctgccttcatactttggtcatgcaatttcctctgctagtatacttttatttttatttattgatctatttatttatttttaaatttttgctattgtactttattcatctctatccacataattttactactcctttaacgcttagctcaaaagtcacttccaagaactcttttctgattttaccaactggaaataacttctcttttccaactcctttaactttccaatttttagcaaattagataaatatccactttattagtcttttgaggattgagtgaactaattatgactctctttaatatccctttctagactgtagaatcattgagagcaagatctgattcagattcatttggatgaatgccacattgcctagtgtaatacccttcatatagtatgtgtacagtaaatatttaatagatgaataaatgtaacatatgagtgcttttgcttttttttttttttttttttgagacagtatcttgctgtgtcatccaggctggagtacaatggcatgatcatagctcactgaagccataacctcctaggctcaagtggtcttcccaccttggcctcctgaggacctgggactataggcacgtgccaccacgctggctaattttttttttttttgtagggatgaggtctccctatgttgcccaggctaatttcaaactcctaggctcaagcaatcctctggccttggcttcccaaagtgctgagattacaggcctgagccaccgggttggccggattgtatcctcagtgccttagtgtctggcatctctatataatagacacttagtaaatgtttgagactgaacagtgcaaaattgtgattcaaaaagtcttcattaggctgcgcacggtggctcacacctgtaatcccagcactttgggaagccgaggcgggtagatcacctgaggtcaacggttcgagaccagcctggccagcatggtgaaaacgtgtctctactaaaaaatacaaaaattagtggagagaggcggcttgtgcctgtagtcccaactactcgggaggctgagacaggagaatcgcttgaacctggaaggcagaggttgcaataagctgagattgcgccaccgcactccagcctgggcacagagcgagactctgtctcaaaaaaaaaaaaaaaaaatctttgttatgtaatgtaactttgatacattcttctgctgataactagaaaatatttagtattttatatttgagatttagttcttgcagaagtacaagagccctcagttcatgtgaggcagtatattgtcatgggtaagaatatgaactttaaaatgagattgcctaggttgaacagttctctgtactacttgctagtacaagttgatcttggggaacttaacccatttatatcagttgtcacatctataaaatgaggaaattaatagtacctactttatatagttgtgaggattatttgggcatataagtcaaacacgtagaacagttcctcagacactgtaaatgccatgaatgttagctaatttattgttacttcctgaaaatgcactgaacacggttcagaacttgagtttgtgagttagggtgtacattctttttaaggaataacactctgctgacatcacatatcctctagctgtacatcctgtctgcttcctactattttaactaggtattgaatggatagctgataatcccagttacatgacagacagtattcagcatgtaaatgttaaataaacaagtcctcttgagacattttaactcagaaaggattaactagttcatgctaaggaacaacatgtacttttgttcactgtatttcctttgaagaatattttatttgttctggttgaatatactttcccattcagtgcagttaactcttcctaggtgataaaccctttaccggtctttactgacaaattaaaatgactatttaacgttccctgtattattttgaaccttaaaactgttttaacagccctctaaaattaatctggctctgatttttttttcttctttaatttttttttttttttttttttgagacagagtcgctgtcacctaggctggagtgcaatggcgcgatcttggctcattgcaacctccgcctcccaggttcaagcaattctcctacctcagcctcccgagtagctgggattacaggcacatgctaccacgtccagctaatttttgtatttttagtagagacagcatttcaccatgttggctaggctggtctggaactcctgacctcaagtgatccacctgcctcgacctccaacagtgctaggattacaggcgtgagccaccgcacccgcccttctgtttttttaaattttaataaaaacaaggtctccatatgttgcccaggctggtcttgaacttcttcgctgaagcagtcctcctgagttcgcctcccaaagtgttgggattacagaaatgagccaccatacccagcttagatatttttaataacaggtgaattctgaaatctacattggtgtaagattaaaagaatacatatggtattgttccattcatataaagtacaaatgcagggaaaactaaactatattgtttatggatatatgcttaggtagtaaagctataaagaaaaacaagggattatcatgaagataggtttgtggttactatgggtggtcggcagggggtggggaagggaattattgattagaagtggtacacagtgatactgggctggtgccttggggtgattacagattaaaggaagtgaatagttgcaagcctgagatgaaaagatttgcttttttatccagctgtttgtattgcattattaatacatgcatataattggttttagtgcctaaatagcaaaatttcagacacatactgacgaaaatgtattacttcttctgcaaaagggtcttttaacaaaagttgacactttcgtaatatagaagccctacttttcctccatacttctttctgtattctgaatcacctaaaaaaaaaccatctcaactggatcttttttccagtgtgcttttcttctaattctaaagatatttattatatcttctttgtacttcctcttcttcttcttatttttttttttttaaagactaggtcttgttctgttgcccaggtgcagtaatagctcactatagcctggaagtccccagctcaagtgactcttttggacttctgggtttttttgtttgttttgagatggagtcttgctctgtcaccaggctggagtgcagtggcatgatctcggctcactgcaacctccaactccctggttcaagtgattctcctgcctcagtctcccaagtagctgggattacaggcatgcaccaccacacccagataatttttgtatttttaatagagacagtgtttcaccatgtcggccaggaggctctcatctcctgacctcgtgatccacctgcttcggcctcccaaagtgctggaattacaggtgtgagccaccgcacccggcctggacttctttaaagttaaaatgattagctagtttcatttggcatctttagatttgaatttgtcatctacgtaggaaaaagaagttatataatcttagggacagtagaaaatggtttgtttatatagccttagatacataacaaagccattaatgttttaagaaacaccccaaagccatctgagtagctacatgaatacatatgattggagatttgtgttaggtttagctgtgatcttaacccttgacatcatagtatagtggttaagagtagaggaaataaacaactaggtaaatctagaatacaggttattctacaaagaactaccctgaacttgtctccccctaaaaagaaacaagagctagggcactgttctagactaaaagacactagcaagatgtgatgaccaagtgtaatacatgaacctaaattgaatcctgatttttggaggaaacagaaataaaataaatttgaggggcaattaggggagatattatggttaattttcttaggtgtggtaatgtgtattgtacttatttaggaagttgtcattattattagaagatgaataacaactggatgccgaaatatttatggtgaatatcataatgtctttatattaaacagttaagaagtgtcttcaaaataagatatgaatgcttaaaaaaaaacacctatgatcagccaggcacggtgactcacgcctgtaatcccagcactttggtaggccgaggcaggcagatcacctgaggtcaggagttcgagaccagcctgaccaacatggagaaaccccgtctctactaaaaatacaaaaaaaaattagccgggcttggtggcacatgcctgtaatcccagctactcgggaggctgaggcaggagaattgcttgaaccgaggaggtggaggttgtggtgagccgagatcgtaccattgcactccagcctgggcaacaagagcgaaactccatctcaaaaacaaaaaaaacactatgatcattctttaaatctctggtaggatttagtagctttattttcaacccatcctttagctccaaggaaaagcagcatgaagtgatggaaagagtactgaatttgttgtcaaaattcttggagtttaatttcagcatcaatattaactctctaggtgactttaaatcatttaaattataataatttaaataatttgtgtaaagcaaatctggcaaaatgtttgaatcccaaatttgaatcctggctcggacaatttcaagtaggaccttggtcacttcacttaacttttctgtgccttcattgtctcgtgtaaaatgaagataatagtaatgtctacctcataaaagtgttgtgaggattaaatagtattataaagataaagtgctcagaatagtgcctgagcattcaacaaatgtagctgctgctgctgttattgttttatatttattttattatctattactttgaagagagcttggaagactcaagaggtagaaaatataaaacagaagtccaggcaggcagaaccctcaaaacaactaggcaaagatcaagcagttgttgttataattaggaaatgagatcccacatgaaatcaccctgcagggtctaacctgtagtaggtattcataaatgttagtttccttctgttatccctttctttccttcctcattttatagtattatttaatctgaggcttgcagagcactatgtgaccatccattctaattctgcttcttctctgcttctggtttgtataacattgagtcttcgaggtgcctttgcacacatcttatttcatctattacattttgatttgatgttggcttgttgcctctactaattactacataatacagttgaataaaatatagtttaagcatatacacagaactgtctgaaaagaaaaatcacgctctagtgttgactgaagatatataatattaagaaaaattataggttattttatattaaaacatatactaattagaagcttagaatctgtctataataccaaaatctaatagccagaaaacagaattttgattattaaaaataactgatcaaatttatctacaatttatatatttctgataattaaagaaataagtgagtctccaaaatatggtaagaatattttttaaaaatctataataaatctttaaatctctgttagaacttgatagcattattaactcatcctttagctccaaggaaaagcagcatgaaatggtggaaagaacactgaatttgttgtcgaaattcttggagtttaatttcaacaccaatattaactctctagatgactttaaatactctaaacatcttggcatctcaagcctcactgtgcattagaatcacgtggggagctttttaaaaaatgcagatataaaatttctgtctcttctgagattctgattcagttgtcctaggatgaggcatggacattgatacaaatacactgtaaaatttcagactattctaatgtatagccagggttgaaaacctttgtatatgtagtttccttggaagcctaggcaaaggaggcatcaaagagaattggctttttatatcctacactgtctaggagagagagagactgaaactgggagatgcaaacaaccttttctagacaggtactctctgctctgtggcactgatgttacgttaggtctcacaggaagctggattagattttgcccaagacgatctgtttttctttgccctgattacttgctctacaagtagcgttctgattattaaatcagcctcctagacacttcagaattataaaaggatgtgcctgagataatgcttgagcattctttttagacacttgagtgtctagaattggttctctagtttatccattagtaccttgtgagtttgcttttagtctctcttggtttgaccaactctggggaactgacagggtcaagttttgatctctaagggtgaataccagatcctgattcctggtaaatttaccaaattagtgaccctgtgttatctcttgacatttggacattttaaatttatggatataaaactccctgaagccgtgaagaatttgtaataaagtattataataaaaatataaataaagagaaatatgtaataaaatctttcctgtatactcttaagactgaaatagctgtccaaaggcagatttttttttttgccagctatggtggctcacggctgtaatcccagcactttgagaggccaaagcaggaggatcacttgagcccaggagttcaagaccagcctgggcatcctagggagaccctatctctacaaaaaataagaaaactaattgggcttggtggtacacacctgtggtcccagctactcaggaagctgaggtgggaagatcccttgggcctgggaggtcaaggctacagtgaaccgtgatcacactactgcactccagcctgagcaacagagcaagagtctgtctcagtcaatcaataaagaaagaaaaaggcaggtttttgttttgtttataatgatcctgattgactgttggtggaaatgtaaatacagccattatggaaaacactgtgaaggttcctcaaaaattaaaatagaggctgggtgtggtgactcacgcctgtaatcccagcactttgggaggctgaggcaggcagattgctggagctcaggagttcaagaccaacctgggcagcatggcaaaaccccatctctacaaaaaaaatacaaaaattagctaggcgtggtggtgcgtgcctatagccccagctacttgggaggctgaggtgggagaattgcttgagcctgacaagcggtggttgcagtgggccaagactgcaccactgcactccagcctggattacacagtgagaccctgtctcaaaaaataaaatgaaatagaactaccatacgatccagcaatctctctattggatatatgtccaaaggaaatgaaatcaggatgttgaagagatactgcactctcatgtttattgcagcactattcacaatagccaagataaggaatcaacctaagtgtccgtctacagataaatagagaaaatgtgtgtatgtctgtgtgcatgcaccatattcatattcagccacaaaacagaatgaagtcctgttatttgcagcaacatggatgaatctggaggacattatattaagtgaaattagccaggcacagaaagacaaatactacatgatctcactcatatatggaatctaaaaacaagttaatcttgtagaagtagaaagtaggatagtggttatcagaggctagagagaaaggataggagaggaggatggatagaggttggtcagcaagtacaaaattacagttagctccatccatgtccctgcaaagaacgtgatctcattcctttttatggctgcatagtattccgtggtgtatatgtaccacattttctttatccagtctatcattgatggacatttgggttgattccatgtctttgctcttgtgaatagtgctgcagtgaacatacgtgtgcatgcatctttataatagaatgatttatattcctttgggtatatactcagtaatggtattgctgggacaaatggcatttagtgggagctgaacagtgagagcacatgtacacagggaggggagcaacacacactgggcctgtcagtggggggcagccgggagagggagaacatcaggataaatagctaatgcgtgcagggcttaatacctaggtgatgggttgataggtgcagcaaaccaccatggcacacgtttacctgtataacaaacctgcatgtcctgctcatgtatcccggaatttaaaataaaataacaggccaggcgcagtggctcatgcctgtaatcccagcactttgagaggccgaggccggcggatcacctgaggtcagtagttagagaccagcctggccaacatggtaaaaccccatctctactaaaaatacaaaaattagctgagcgtggtggtgggcacctgtaatcccagctacttgggaggctaaggcaggagaattgcttgaatccaggaggtggaggctgcagtgagccaagatcacgccactgcactccagcttgggtggcagagtgagactttcccccccccaaaaaaaagattacagttagatgagaagcgtaactggttttctgttgtacagtagggtgactatgactaataataatgtatatttcaaggtagctagaagattttgaatgttatcaccacaaagaaatgatagatgtgactggtgtggtggcttatgcctgtaatcttaacactttgggaggccgaggcaggaagatcacttgggcctagaagtttgagaccaacctgggcaacatagtgagaccctgtctctacaaaaaagtaaaaaaaaaattagccaagcatgatggcacatgcctgtagtccccgctactcaggaggctgaggtgggaggatcacttgagcccaggggtttgaggtttcattgagctataattgtgtcattgctctccagcctgggaaagagaacaagaccctgtctctagaaaaaaacaaaaaacaaaaaacaaatgataactttaaaattatatatgtgctaagtatctttatttgatcatcatacagtgtatacatgtattaacatattacactgggccagacgcgatggcttatgcctgtaatcccagcactttgggaggccgaggcgggctgatcacctgaggtcgggagttcaagaccagcctgaccaacatggagaaactccgtctctactaaaaatacaaatttagctgggcagtggtggtgcatgcctgtaatcccagctactcaggaggctgaggcaggagaatcgcttgaacccgggaggcagaggttgcggtgagctgagatcgtgtcactgcactccagcctgggcaacaagagcgaaattccatctcaaaaaaaaaaaaaaaattacactgtaccccataaatgtgtacaattatgtgtcaattataaataaagttgaaattttaaaaatgatctgtggctggccgcggtggctcatgcctgtaatcccagcactttgggaggccgaggcgggtggatcacgaggtcaggagatcgagaccatcctggctaacatggtgaaaccctctctctactaaaaatacaaaaaaattaactgggcatggtggtgggcgcctgtagtcccagctacttgggaggctgaggcaggagaatggtgtgaacctgggaggcagagcttgcagtgagctgagatcgcgccactacacttcagcctgggcgacaggacaagactccgtccgtatcaaaaaaaaaaaaatcttgtttagaaggacattggggaactgaatgaattattattttgattgctgctttttttttgcacatttatttaataaatgtttattgagaacctaccatgtgctaatcatataggccttagtaatcatcttgattactctatctttcctaaaaataaaacaaaaataacctaacaaaaacccactaagctcttctgctgcactgagtgctacttttcttttcttttcttttggtttttttttggctagatacactctcattttgcctttcctcccttttctttttctttaatttgtagtatggtacttgtctgctttcatgttcttactactgttgaacctgcttggtagatgaagtagccagatcagagcttttgttttgtgtaagttactaataggttattttactattcaagtctttttcccctgtcactaagtacttggttgagaaaaaataattgaatagctttttgaaataaaacatgtcattcattccaaagaatgcaaaagtacatatagttaatgagaagagagctgaaaaacatatcctgcttagtttcccaggaagctaaggggaaaaaacataaacttaccttgccttacctagaattggaccagaatgtggaccttatatgagacagcttgaagccttgacctttgggtacttagcttgttctgaaatcaacaattcagaggactaaagagcctttggtaatcagtcagggttcacttgcaagagagagaaacttctttggtctgggctaggaatgacttctactacaatatttaaattggcctgtcagaggaatgctacctttgctacagtcagaaggttggcattaggaggccaacatgaaatgctgagtttgagaatgcgccatctcaataccaaaaaaacccagtaaaaacataggcaaaagacttgagtaggtgtttctccaagcaaaatatacaaaggtctagtaagcatatgaaaagatgttccacatggctaatcattactgaaatcaaatcaaaatcacaatgaaatactactttatgtcataaaatggctactattaagaaaaagaacagaaaattacaagtattagcaggaatatagagaaattagaacactttgtgcatatttctagtaggaatgtaaaatggttcagctgctgtggaaaatgatatggtgactcctcaaaaaatttagcagaattactgtacaagccagcaattccacttctaggtatatacctgaagtaaaagcagggacttgaacagatatttgtttacccatgttcaaagcagtattattcacaatagccagaagatgaatgcagcttaagtgtccatggatggatgaatgtgtaaacaaaatgtgatatatacatagaaggggatattattcagccttagaaagaaaattctgggctgggcgtggtgactcatgcctgtaatcccagcactttgggaggccgaggtgggtggatcatttgaggtcaggagttcgagaccagcctggccaacattgtgaaaccccacctctactaaaaatacaaaaattagctgggtgtggtggcaggtgcctgtagtcccagctacttgggaggctgaggcaggagaattgcttgaacccgggaggcggagcttgcagcgagccaagatcgtgccactgcactccagcctgggtgacagagtgagactccgtctcaaaaaaaaaaaaaagaaagaaaattctgacatacactacaacacagatgaaccttgaagcctaagtgaaatgagacacaaaagaacaaatattgcatgattctacttatgtgaaatatctagaatagggaaattcataacaacagaatatagattagagaataccagggactgagcatgagggggatagtgagttattgcttaataggttacagggtttttgcttggagtgatgatgaagttctgaagttggatggtggtaattgtggcacaacattgtgaatgtatttaaggaaacagaactataacacttaaaatggtaaaaatggtaaattttatgtatagttaaccacacacacagaaaagagcatgtatctgttatgcaggtattaggaaaccactactacttgccccacaactgcagctgcttcatgacccttacaaagttagtgactgaaacctggagaattatgtgcatgtggtcagcatttccataatccttgtggatagccaaaacttcagtaaaacaactcccatttcaccatctgttttccatatctcatgagcatctcatgagcatctagttggctgaacctgattcacatttgaatcctagtagcaagggaccctgaggaataatgattagcttttcagactgtgtagtaggaggaaacgactagagggagactagaaaggatactgagtgctgcttcatcatatctgccacaggcactgagtcagaggtgattcgtagatggcagtgctccttttagtcaggtcaccatttccagtagtattgagaatgtcctgcagctgataagttggagaggtagggtggggacaaagtcattatctctttttgcagttaatgggctgattgtgctatggtatttgcagttttaatgtggtagaacacatttggattatttaaattattgtaaagagatttgggtcactctaatgggatgcattaaagactcattgactaaagactatctgggctaatgtttaggagtaccaaatgtaaggttgttatgtttatgataagcttttttcatttcatcaagtatggatataagaatataatagaaaatatactgagttcttttgctcttaggctgctgaaatctctaattagtatgaactaaatttgtttggagagaaaagaaacaaatttactagtaaagcatttacttgctgaaaattgcacttcttaaaaacagttttcaaaaattctaaccagaggtcacccaaaagataagatatttcatattgttcagaacagtccggtgtttttatctgttatctgtgacttaaaactaagtttgaataattcctgttgataatcggattctgcaggaatgactgttctctcagcaccttgataggtattgacctttgatgcttaagtggttttttctttttttttttttttttttgagacggagtttcgctcttgctgcccaggctagagggcaatggtgtgaactcagttcactgccacctccgcctcccaggctcaaacaattctcccgcctcagcctcctgagtagctggaattacaggcatgcaccaccacgcccgattaatttttttttttttgcatttttaatacagacagggtttcacaacattggccaggctggtctcaaactcctgacctcaagtgatctgcccacctcggccttccaacgtactgggattataggcgtgggtcaccacccattaacattttggacaagtaccaagctttgcatgaaatgctttttaaggtggaccacgctttaatggtgtaataagagttagtatttaaatcagatttgttgatacagttattccacttctagaaatttaacctaaagcaatgcaatgccatttataataataataaaatagtgaacaattgttaacaatggggagatggataaattattgtatagtcatacaatggaatgttttaaaactatcttttcaaaagatatttaatagcattagacaggactcatgcaataatgttaagcaaaatgatacagaattatgtatgatgtgatttctctttatagaaaattttgtgtgtgagagaaatataacaaattataaggagtgatcctttagggattagttttcaaattttctgttcttcagtgaatatatattgcttctatatatttggctttttattatagagagacttaattataaaagattcaaaccatgcagaaacttgcagactaaaaaccctaaaaatccttcctctgtccccgacctagagaaatggagaccaattcatcaatttgtttttatatggattttgtttttggtgtcacatctaagagatctttacctaacccaggtcagaaagattttctcctagaaattttctagtcttaggttttatgttaggtctatgatccattttcagttaattcttatatgtggtagaagtatgaattgaggtttttacatatgggtatccatttgttccagcatcatttaatgaaaagactgtgttttctccactgaattgcctttgcacatttgtagaaaatcagatatctatatatgtataggtttgtttctggactctatattctgtttccttgatttatgttaacaccactttgtcttgatttgagtactgagataggcagaagtccccgggttcaagcaattctcctgccttagcctcctgattagctgggactacaggcaagcaccaccaagccgggctaatttttgtgtttttagtagagacagggttttgccatattggccaggctggtctcgaactcctaaccccaagtgatccacccgcctctgcctcccaaagtactgggattacaggcttgagccaccccgccctgtcaagatacagaattctaaaatgactcctaatgacctatgcttttgtataatgggagggacctgtaatcccacctaatcatgggatatcactcccatggtgactaagaaagggagattatcctcagtggacctgatctaatcagacaaacccttaaaagggactgggcttttcctggagaaataatccaagtacaagggaagggaattcaacacagaagaagctgctgatttttgggaaaagaggaggccatgcagtaaagaattcgagtggtcggtaagcttacggtaatttgttacaaagcaatagaaaacaaatacaggtagttgtataataagtgtttaaatcagctgtttatgaaatgtatcaatatctacaaaattaaaggcccgttgggattttgattggaattgggttgaatgtgcagataagtttggggaaaattgtcctcttaacagtattgattcttctgacctactcatttctcatttttaggtgttcgtcttagcagtgttttttgttgttttcagcatataggtcttgcccatgttttgtcagatttatccctgagtatttaatattttttatgctattataaatggtattttatacattttaatttttgattgtttgttgctagtatatggaaatacaattgatggctgggtgtgatagctcacgcctgtaatcccacactttgggaggctgaggcaggtgaatctcctgagctcaggagttcgagatgggtctgggcaacatagcaaaaccctgtttctaccaaaaatattaaaaattagccaagtgtgccaagtgtggtgcgcatgcacctgtggtcccagctacttggaaggctgaagtgggagaatggcttgagcctgggaggtggaggttgcagtgagccgagatcgtgccactgcactccaacctgggtgacagagtgacaccctgtctcaaaaaaaaaaaaaaagaaaggaagacaattgatttttgtttgtcgatactatatgtggcaatcttgctaaactgacttattctagtaactgtttttggtatagtctattgaattttcaacataaataatcaagttgtcagcaaatagagttttatttcttcctttttaatctgtatgccttttactttttttttttttttttcctcgagatggagtctcactctgtctcccaggctggagttcagtggtgcgatctccgctcactgcaagctccgtctcccgggttcacgccattctcctgcctcagcctcccgagtagctgggactacaggtgcctgccaccatgcccggctaattttttgtatttttattagagacagggtttcaccgtgttagccaggatggtctcgatctcctgacctcatgatccacctgcctcagcctcccaaagtgctgggattacaggcgtgagccaccacgcctggcctgccttttgcttcttttttttatcttattacactgaccagaacttctgatgttttgtagaagtggtgagagtgacggtcttgccttgcatcttttttttttccttacacttgctttttaaaaaaattttatttttatttttgtttttgagaaagagtctcactctgttgcccaggtggctcactgcagcctccaccttctgggttcaagcaattctcctgcctcagccttctgagtacctgggattgcaggcacccaccaccatgcctggctaatttttgtatttttagtagagatggggtttcaccatgttagccaggctggtcttaaactcctgacctgaggtgatccgcctgtctcagcttcccaaagtgctgggattacaggcatgagccaacatgcccagcctttgttattgatttctgccctcatcattattatttccttctgctttgggtttaattttctctttagcttcttggtggtattattttagctgatattagtggatttccatttctcccaacctttgtgctattgttaacatatgttttacatatgttataaatcccacagtacattgctttttgtttaaacagtaaattatcttttttttgagacgaagtcttgttctgccaccaggctggagtgcagtggcacgatcttggctcactgcaacctccgcttcccaggttcaagcgattcttctgcctcagcctcctgagtagctgggactataggcgcgtgccaccacgcccagctaatttttgtatttttagtagagacggggtttcaccatgttggccaggatggtctcgatctcttgaccatgtgatccgcccgcctcggcctcccaaagtgctgggattacaggcatgagccaccacccggcctaaattatcttttaaagaaacttaaggccgggtgcagtgcctcccatcactttgggaggccgaggcaggcagattacctgaggtcaggagtcttgaaaaaccaaacaaaacatcaatacaaatgaatatccttctatcctgaaggacaaatgaatgaggacagcatcctcttccttttcccacaatgtaataattcttgatttgagtgtttatcatggccttataagtgcattgttggctattaaaaactttctgtgcttccttacaacaagcaaagttaaaagctggtactgcggctgggcgcggtggctcacgcctgtaatcccagcactttgggaggccgaggcgggtggatcacaaggtcaggagatcaagaccagcctggccaacatggtgaaatctcgtctttactaaaaatacaaaaattagcctggtgcagtggcacgggcccataatcccagctactggggaggctgaggcaggagaatctcttgaacccagaggcagaggttgcagtgagcctaggtcatgccactgcactccaggctgggtgatagagtgagactctgtctcataaataaataaactaactaacttaaatagtaagaaaaaatgtatatatttatgcatgtggctaccattttggtgttcatttctttgtgtagattcatattttggtatggtaacattttctttctgcttgaaggaccttaaatttttgtagtgcatgtctgctggtgatgaaatcagcttttgtgtgtctgaacaagtatttgcctttgcttgtgaatgatatttcactgggcctacggttttaggttgttgttttttttttctttcagtactttatgttgtttcactgtattctagcttggcttgagcccagtaagaaatctcttatcattcttacctttgttcctaatgtgtctgttttctctttttgcttttaagattttctcattgtcactgtttttaagtaatttgattttggtatgccttggtatagctttcttcttgtttcttatttttggagtttgttaagcttcttggatacacatgtttatggttttcaccaaatttggaaaatttttggccattgttacttcaaatattttttctgttctctcttgtcttttggaagctgtttgatgttgttccacctctcactgatgttctttctttggtgtgtttgtgtgtgtggtaaaatatatacaaccaaatttataatttaaacttttttttttttttttttggagttggagtcttgctctgtcacccaggctgaagtgcagtggcacgatctcggctcactgcaacctctgcctcccgggttcaagtgattctcctgcctcagcctccagagtagctgggattacaggcacccgccaccatgccaggctctttttttctatttttagtggagatggggttttcacagtgttagccaggatggtctccatctcttgacctcgtgaccgcctacctcggcctcccaaagtgctgggattacaggcgtgagccactgctcccggctgaaatgatttttttatatagttcagtggcattaagtacatttactgtgttgtgcaaccattatcaccatccatctttagaacttttaaaaaatcttcccaaactgaaattctgtacctattaaaaaatgactcattctccctgctcccagtccctgacagccaccattctactttctgtttctgtgaatttcactactctagttacctcgtataagtggaatcatacagtatttgtccttttgtgactggcttatttcacttagtataatgtctttaaggctcatccatgttgtagcatgcgtcagaacttccttcctttttaaggctgaataatagtctcttttttaaagttctcttttttttctgtgttttattttgaaaagtttcttttcttttcattgtttttttgagacaggctcttgctctgttgcccaggctggagtgcagtggcgcgatctcagtccactgcagccttgaactcctgggcttaggtgaccttcttgcctgagcctctgagtagctgggactacaagcatgggcaaccatgtctggctaattttaaaaaattatttatagagacgaggtctcactatgttgcccaggcaggtcttgaactcataggcttaagcaatcctcccacctcagcctcccaaagtgttgggattgcaaccagcgcccttgaattgtttctattgttacttagttacatttattgctcttaccttctgcagtggctcagcagctgttagtcccatccagggtatttttcatctcagattatttcattttatctctagaacttggagttgcgttagtctttttttacttatctatttccttttttgttgagatggtgcaggggcaggggacatctccctttgttgctcaggctgaccttgaactcctggccgcaagggatcctcctgccttgcctcccaaagtgcagggattacaggcgtgagccaccacctggccattatgtgtctatttcttcatttaactttttggacaaatgtaatacacaattatcataactgagttaatttccttatctgctaattttattaaatgtgtcagttcttgattgattgattcttctcctcattataagtgatactttcctgcttctttgcatgcctgacaatctttgaatagattccagacattatgaattagttgttggacattatgaattcattgttgggctctagatactttggtatttctattaatattcttgagctttttgtgggatgctgttcaactacttgaacagagtttgatccttttgagtcttccttttaagatttgttaggatgaacccagagacatgtttagtcaagggtagggtttctcaatagcagcaccatggcatttggggccaaataattctttgttgggggaggggatagtcctgtgcattatagaatgtttaacatcattcccccccaaagttgtaacaaccaaaaatgtcttcagacattgccaaatgttccaggaagtggggaggattgcccgcagttgagagttgctgccttagggttagttttgccttactactatggcaagatctttctgtgtactctacccaaagctgttcatgagaccttttttcaatctggctctttggaataggtacttttcttggcctcatgtgagtgctgggaattcaattgggtggtctttccttggtcttggttagtttccttacatacatgtgctgataggcattcagctaaatattcaagagagacccgcagatctctggagttcttgtctgtgtatctcgtctccagtattgtgccccataaacactagccatcttgattgccccaaactctcagctccatctcttcaactcagtgagcctgccaggcctcacatgagtttcccatcctgtgcctcttgtggctgggaaactcaaggccgtaacctggggcagtagggttcaccttatttgtttcctggctctcagggattttcctgatgtccagtgtcttgacacttttttttttttttttttttttttttttggagacagagtttcgctcttgttgcccaggctggagtgcaatggcacgatctcaactcaccgcaacctccgcctcccgggttcaagccattcttctgcctcagcctcccaagtagctgggattacaggcatctgccaccacacctggctaattttttgtatttttggtagagacagggtttctgcatgttggtcaggctgttctcaaactcccaacctcaggtgatccgcccacctcagcctccctaagtgctaggattacaggcgtgagccaccgcacctggctgaaacttttttttccccatatattttgtttgttttttggttgtttcaggtcagaggataaatctggttcttgttagtaaatcttggtcagaagcacatgtcctttaacagatcatttatttgtattaattattgataaaagctgaattcttaaacatttactaatctaatttccttattttatcaatttgtatttatcattcaaagtctcctgttccctgtaattcctttggtacaacataaatattaaattggccctaaagctttttatcatcttttaatatacctctttcatgcaggctttcacagggttagctaagtagtgatttagtatgggcctcttaactattatatagtagcatacaattaaagggcatgcactgacctgataaagcagaacagtgaaatgtgtcatgcttttagggcattcccacagcaggctcaaagacttccaagagacttccacgtataacttatattttctagcagctaaaacgtcagcatcaaagcctattagcctgattgaggttgtaaagaactggtgagctaagacagtggaaaaaaacatataaaagaagagaagaatcattttgaacagagtatgagaggaaactgtcctaacgaataatgctacaagaatgggagtgacatggaacccattggtggtaagctgttagagaaaggggaatgttaacagactagaaataatgtgactgaagaaatctggccttgtattttttatttatttttttttatttttgagacggagtcttactgtgttgcccaggctggagtgccgtggtgtgatctctactaactgcaacctttgcctgccaggttcaagcggttctctgcctcaacctccctagtagctgagattacaggcgcccgccaccatgcctggctaatttttttgcatttttagtagagacggggtttcaccatcttggccaggttggtcttgaactcatgacctcgtgatccacccgtctcagcctcccaaagtgctgggataggcgtgagccaccatgcccggctggctttgttttatgtgaaggaaacttgtctctcagatttgctatatcataaccactacagagattatagcatgtgcttgttggatatccaaggatgaagtaatttagtcagagatactttgggtaaaagaagatatgtatagtaggtagggtgaaagcatctagttatccatgtgaactaaaacagcaaaatcatatttctaatggaattgtatatatgatataataaatgatataaaataatataataaatgtataagttccatgtgttaaagtgaataaatcataattctttgacatttgaggtggtgatgatatgctacagctaaaaagagttaagagtttttgttattccataatgcataagaattagacaactttgtaaaaaatacagactccttgtaaatggatgttataataattttcaaagacagggaaactatgtgggtcaataatataagttcttttgtgaaacaaaatatgacttaagtcttccaaaaattacgattgcttttagtaataaagaaataaatacttaatgtttaactgacacttccctgacattcatctgtgggtggattttatcaagcttatttcttgttttctaaatagttttgatgatataaatggtgctcatgtagttagtgtctgcctttgccaagttactgtaagtcttcgtggcaggagtttatgtgggtagggaaagaatgcagagcaataccagctttttttttttttttttttttttttgagacagagtcttgctctgtcgcccaggctggtgtgcaatggcacaatctcggctcactgcaagctctgcctcccaggttcacgccatcctcctgcctcagcctcccaagtagctgggactacaggcgcacgctgccatgcccggctaattttttgtatttttagtagagatggggtttcaccttgttagccaggatggtcttgatctcctgaccttgtgatccacccgcctcggcctcccaaagtgctgggattacaggcgtgagccaccgcgcccggccgcagtaccagcttttaactttgcttgttgtaaggaagcacagaaagtttttcatagccaacaatgcatttataaggccatgataaacactcaaatcaagaattattacattgtgggaaaaggaagaggatgctgtcctcattcatttgtccttcaggatagaaggatattcatttgtattgatgttttgtttggtttttcaagactttgaaaataaagtttaatctaacatatatagagaaaagtatagatcacaattatacagcttgatgaattttcacaaaaggaacaaactcatgtaactaatatgcagatttttaaaaaagaacatttgtattagaacagtttttctttttttcaagctgggtaataggcacataggtgttcgttgtatcattttattcttttatgctttgaagtttgcctaccatttttaaaaaattatctcaggtggaaatacaatcttcagaggtctggaaagtgtcagaaaacctacaggctttaatagttgagaaagtacttttgagaaatagtgtttttttccatgtaggcctttgtctcctatgtatctgatatactttataaacctgagaaggcccaagtaactgaatgttttacaataaaagaagaacataaatagagctgtgtgaaatcaaagtagtaaaaattattggtactttttaaaacatagcaccttattggccttttattctgcagtataaagtctgggtcatcaaatttgtgagtacatggaaatgacagttttcttttaaaaattttattgctaaagtccgtgatagtttaagaataaaatgccctattcagttctataatgtaatattcaaagctgtagaaagaactgagttattattgagattcaaatatatgtctagtttaaaggcttcatatctgttatagaaatcattatgtgtgcagtagttagaaatacgcttaatctaaagggttccctggaattacagttatctactttcctttatgtttatttccccccaggtggggagatacgttttccatgaacatggagatttcagaaatcggatttttttctcttttctttgatttttaaaaatataataaatcttcctatatttcttgattttatgaaaagtattaaaatgggatttttctcagttctcgagtaggctttttaattaaattgtgactcatgcagtggaaaagccatttgtaaaatgtcgttctgtaaaaatgtttggttattaaattttcttctgctgttggagtcatatgcataaaattattagtgtgttaatctattgaaaaccattcattattgaataatttttgtttcttttactctagaaaccaataggatagtgtaggtaaattactgtttctggggtgcgtgtgtgtatatacatatgtgtgcgtgtgtgtgtgtgtacatctctctctctctctctacatatatatatatatagttttttgtttttttttctttgagacgatctccctctgttgcccaggctggagtgcagtggcacaaccatggcgcactgcagctttgacctcccagactcaggtgatcctcccacctcagcctgccaggtagctgagactataggtgtcccaccatgcccaggctaaaatttttttttttttttttttttggtagagataggatcttgctacgtggcccaggactggtctcgaactcctgggcttaagtgatcctcccaactcagcctcccaaagtgctggggattgtaggcatgagccactgcgcctggcctgtttctggtgtatttatgtgtgtttgtctttgaagaaattgttaggacatactgaagcttttgttttgttttcctgttttctctctacaggcagcggaggaggaaatggcaggtcctaatcaactctgcattcgccgctggactaccaagcatgtagctgtgtggctgaaggatgaaggcttttttgaatatgtggacattttatgcaataagcaccgacttgatggaatcacattgctaacattgactgaatatgatctccggtctcctcctctggaaatcaaagtcttaggggacattaaaaggttaatgctctcagtccgaaaattgcagaaaatacatattgatgttttagaagagatgggctacaacagtgacagtcccatgggttccatgacccctttcatcagtgctcttcagagtacagactggctctgtaatggggagctttcccatgactgtgacggacccataactgacttgaattctgatcagtaccagtacatgaatggtaaaaacaaacattctgttcgaagattggacccagaatactggaagactatactgagttgtatatatgtttttatagtatttggatttacatctttcattatggttatagtccatgagcgagtgcctgacatgcagacctatccaccactcccagatatattcttagacaggtaagttttgtttctagttgctaagtttgtaggatgttgctataattaacagcaatgatactatatttatgataattatattgtttcttattgtggtagatgtatactttccatttgctttatctggcggtataaaatgctttgaaattacctttttcacttagagtaaattaggccttaagcctaggtgtgtgagaaaaaccactgctcttttaatttttcaatttaatttaattttaattttaatttaattttttattttgagacagtctcacactgcactgtcacccaggctggaatgcagtggcatgaccatggctcactgcagtctcaacctcccgggctcaagcaatcctcccacctcagcctcccaggaaactgggactgtagacatgttccaccatgcccagctaatttttaagttttttgtagaaatagagtcccaccgtgttgcccaggctgggtgaactcctaggctgaaacgatcctcccaccttggcctcttaaagtgttgggattacaggcatgagccatcatggcctggactgcttaatttatttttgtgtagttatagctccttgggtactttagattttttgagacagagtctcgctctgtcacccaggctggagtgcagtggcatgatcttggctcactgcaacctccacctccctggttcaagccattcccctgcctcagcctcctgagtagctgggattacaggagcccgccaccaggcccagctactttttttgtatttttagtagagatggggcttcaccatattggccagactggtcttgaactcctgacttcaggcagtccgcctacctcggcctcccaaagggctgggattacaggtgtgagccaccgcgcttggccaggtactttagattttaagagggtatctggaatgatgtttgtaataaatggaacttggctgcctttttttatttttttttaaatgaagaatagggttctgctttttcaaaaatattgatggtgtcatatcaccaaatgaattggaactatcacaaagaggacaagtggattcagtgatagcatgctgttttattaaatattgaatacataaaaaaatgtagtatatgtgtaacatatgaaaaataagaatagggccgggcgcggtggctcacgcctgtaatcccagcactttgggaggccgaggcgggcggatcacgaggtcaggagatcgagaccatcccggctaaaacggtgaaaccccgtctctactaaaaatacaaaaaattagccgggcatagtggcgggcgcctgtagtcccagctacttgggaggctgaggcaggagaatggcgtgaacccgggaggcggagcttgcagtgagccgagatcccgccactgcactccagcctaggcgacagagcgagactccgtctcaaaaaaaaaaaaaagaaaaaaaaaaaagaaaaataagaatagaacagtaggccaggcatggtggctcatgcctataatcccagcactttgggaggcccaggtgggaggattgcttgagtccaggagttcaagactagcctacaagttcaagacttgcaacatagcaagacccccatctctccaaaaaattaaaaattagccaagcatgatggcacatgcctgtagtcctaactactcaggaggccaaggtgggaggatcacttgagcctaacaggttgaggttacagtgagctatagttacaccactgcactccagcctgggcagcacagcgagaccctgcctgtctccaacaacaataataataataaaacagtaaacaagtactcagaactgttttcacatttttgatttttaaatcttttaaaaatttgggtattactttcttgtttgttagtttttggttttgtttttgttttttagatggagtcttgctctgtcacccaggctgcagtacaatggcacgatctcagctcactgcaacctccgcctcctgggttcaagtgattctcctgcctcagccttccgagtaactgggattacaggcacccaccaccacgaccggctaatttttgtatatttagtagagacgaggtttcacagtgttggtcaggctggtctcgaactcctgacctcaaatgatccgcccacctcagcctcccaaagtgctgggattacaagcatgagccactgcgcttggccccttgtttgttttttataaaacattttgcccttctaaaagtgcctttgctgggcattagggctcatacctgtgatcccagcacttcgagaggacgaggctggtgggatcacctgaggtcaggaattcgagaccagcctggccaacatggtgaaaccccgtctctactaaaaatacaaaaactagctggatgtggtggcggacacctgtaattatctcagctactcaggagactgaggcaggagaattgcttgaacctgggaggcagaggttgcagtgagccgagatcgcgccatcgcactccagcccgggtgtcagagtgagactgtctcaaaaaaaaaaatacataaagtaaaataaaactgccgtgtagtatttgtatttgaaaatgaaatgaatttaaaatgtccgtgttcctatgccagaataatgtatacatctcattttgctccctgtcaaaccccaactaaaactatagtaaagaggtttttttttttgttttgtttttgttgttttgagatagagtccaggctggagtgcagtgacacaatctcggctcactgcaacctctgcctcccgggttcaagctattctcctgcctcagcctcccaagtagctgggattacagacatgtgccaccatgcccagctaattttgttgtatttttagtagagacaaggtttcactgtgttggctaggctggtctcgaactcctgactcaaatgatccacccacctgggcctcccaaagtatagggattacaggtgtgagccaccatgcccggtgagctgtagtaaagagttttttgtttttgttttttaagtaagcccacaggatggagtggataaaataggagaaaacagccatacatttttggaagttggaagatggatggatgagtggcaattgacaaacccaaaattaacctaattataaaatttgagcaatggggaaaactgagaaccaaccccgtttatattgcagatttctccaaagtaaggagaacttactgaaagctgtttaagaagttgttatatccgtgtatcttgtctccccttctatacagtttttccaactgtaaacagaagaccactaggaagtaaggaagaaatcatgtggctgtctggggaaaatagtactttaggcaaagcaaacagctgggtgcaaaaatctgaactgggagtgttcctggcaggtttaaggaacaaccagtgagagatgagcagatctgagaggagacaagaagccaggttgtgtaaggacttgaggaccattgtaaggacttcagctttcattctaaatgaaaagggaaggcactggaaagtactgaggacaagagttgagggatctaacttctattttaaaaggtcattctagttgttgtattgagaataccctggggtgtgggtggggatctagagatcatttaagaatttattaaattcatctagacaaagattttagattggatgagaacagtggtagaggtggtatgaaagagtcaaattctatatatattttgaaattagaaaattagagctaacagaatttgctgatgaatttggatttgatgaattaagagagagaaatcaaatattattccaagatgttttttgttttttgttttttttgagacagggtctcactctgttctccaggctggagtttagtggtgcattcatagatcactgtaacctcaaattcctaggctcaagtgatctccttccttagcctcccgagtcactacgactgcaggtgtgtgtcaccacacctgcctgatttttaaatcttttgtagagatggggttttgctatgttgcctaggctggtctcaaacttttggcctcaagtgatcctcccatccctgcctcccaaagcactgggattgtaggtgtgagctaccaccccccagcctattccaagatttttaacctgaccatctgtaaagatggagttgccatttacagagatgggaaaactgtggaaggagctgacttggagggaaaattaagggtttggttttcgacatgtcaggtttgaaatatgttttgtagcaaattcagatgtcaaggaagagatggaaatatgagcagaagttcagagagattgagagagacagaaatctaggctaagatttgggaatgggcagagagagagaacagtatgccagaagccaagcaaaaaaaaaaaaaagtattttaagaagtttaggaacaattggctgtagcaaatgctgctgaaaggtcaagtaagatgaggataattgaccattggctttagcaacatgttggtcatcagtgactatgacaagagttaataagggcaaaaatgggttataataggttcaggagagaatgtgagatgtattggaatttacatgaaggtactccacaaatgtgaaacaacatgagcacaacagtatttgttgtgacattgtttgtaataattataaatattgtaaataatctaaatgcttacccatgggaagctggttgagtagactatcatacatctatacagtggcatactatttaatcatagaaaagaatgaagacaatttctgtgagctgatacaaaatgatttgcaggaaaaactcagcaacaatagcactatgagcacacagatcgtggttttaaaatactgttcccaggccaggtatggtggctgactcctgtaatcccagcattttgggagacccaggcgggaggattgcttgagcccaggaattctagcccagcctggacaacctagtgagatccagtctctacaaaaaattaaaaattagctaggtgcggtggtgtatgcctgcagtcccagctacttcagaggctgaagcaggaggatcacttgagcccaagagatcaaggctgtagtgagctgtgatcatgccactgcactccagcctgggcaacaaagcgagaccttttgtttgtctcagtaagtaagtaagtaaacaaataaatacataccattcctcacgaaaatgaactagaccagggctgagaccaagcaaacaaaaattgtggggtgagaggggaagctcttcaagaataatacgagcaaataaatgtgggcagcatgattattctgcctcctccagtgtattcaggcaagtcatcagtagatgataaaatctattaggtgaaaggccactgagggggagcttattcacatgatctgaaagtttcatctcacctattacttaattacagagggaatgaggtagctttacaatggcaagatctgacatgcatcaccttaaccaaatgatcaaatgtagtagcatcacagtgggacaaacagacattatgtgcattggacgtgatgtccacagcatcacctatgtaatcatcttgtccaaaaaaaaaaaaactttaacctatatctaatcacgaagaaacaatcagacaaatccagaacatggaacattctacaagacagctgacatggactctaaaaatgtcagtgtcatggcaggcaaaatccagggggaaatgtaagggaaattgaagagacaaccaagagccacgtgaaatttaattagatcctatatcaagaaaacaaaaataatgctatacaggacatttttgggacaattaggaaaattggaatatggactgcatgttaaataatggtactaaatcagtgttacaatgtccttggtgtaatagtatattgggttatgaggaggatatccttgttcctagagaaacaaaggggagaagtgtcataatgtctgcaacttacttcggggaggggttcacctccccgaaaagagtatgtgtgtatatgtgtgtaggtatgtatagaaagaatgaaagcaagcaaatgtggcaaaatgttaattattgtaaatgatgagtttaggtgaataatatagtgttgattcttttaactttttttgtagatcagaatttttcacgttaaaagaattaggcaaagaaatgatgagggggagagagagagagagagagagaataggaacagagaaattggagacatatgctatatgatagcatgtttgttgtattgataataagaatgactcaatgtaggggggtaatgatggtagaggaaagagagggtataatgttagaacagtgcccttgagtagatgaaaaggaatggtaccttgtggctgggagaggctggccttaggcccttgggctgttccttcataacagaggggaaggtagaaaataggaaaataggtggaggttgccatatgtgatggtggagcacaacgaagtgctctcctgattgtttttattttctctgtttaaagacaaaatggagaggaggatggaggcttgaggaggaaggatgagatgtataaaataagccatctaggagagtaggagagtgaatagacttgtgtaatgcattagcagcacttaatggtctccttgaggttagtagtcatattagcattgtgtgtttttaccagcctcattcaacagcagatacaggtatggaataggtggagaactggatttaagcagggttgagtattgctaggcagtacaatgaagggaaaagtggcaagggagtggttttaatgagggaccatggactgatatggatgaggaaagaagtaaggccgggcgcggtgtctcacgcctataatcccagcactttgggaggctgaggcgggcagatcacctgaggtcgggagttcaagaccagcctgaccaacatggagaaaccgcatctctactaaaaattcaaaattagccaggcatggtggtgcatgcctgtaatcccagctactcgggaggctgaggcaggagaattgcttgaacctgagaggcggaagttgtggtgagttgagatcacaccattgcactccagcctgggcaacaagagcaaaactctgtctcaaaaaaaaaagaaaaaaagaaggaagtaaaggatataaggtagatgaaaaaataataaaaaacaagcaaaaaataaaaaaacaaagcatagtgggagagcaggaaatggtccagcagaacaatgaggcttttattattttaaagtatacaggctgagtgcggtggctcatgcccgtaatcccagcactttgggaggccgaggcaggtggatcacctgaggtcaggaattcgagaccagcctggccaacatggcgaaaccctgtctttactaaaaatataaaaattagccgggcgtggtggcatgctcctttagtcccagctactccagaggctgaggcaggagaattgcttgaacctaggaggtggaggttgcagtgagccgagatcatgccactgcactccagcctgggtgacagagcgagactctctcaaaaaaaaaataataataaagtatacaattcagtgggttttagtgtatttacaaagttgtagagccatcaccactaattccagaacattttcatcatcctgggaagaaactcatacccattagcagtcatactctattccttcctttctccagaccctagcaaccactaatctactttgtttctatgaatttgtctattctggacatttcgtataagtggaaccatacaatatcgggtctttttgtgtcactcagcataatattttcaagattcatccgtactgtagcatgtatcagcactaccttctttcttattaccaaataatattccattgtatggatgtaccaattttgtttatccatttatcagttgataggtgtttgtgttgtttctactttttggctattattaataatgctgctatgaacattcatatgcaaagttttgtgtagacaaatttttttttctttttctttttttttttttgagacagagtctcactctgttacccaggctggagtatagtggtgcaatctcaactcaccgcaacctccatctcctgggtcaaacggtgctcatgcctcagcctcctgagtagctgggattacaggtgcacaccaccacacccagctaatttttgtatttttagtagagacggggtttcaccatgttggccaggctggtctcaagctcctgacctcaagagatccgctcatctcagcccccacaaagtgcaagcattacacgtgtgagccaccacacccagcgggacatgtattatcaatttgcagtgaggatttcaaaccaaattttgcctaattctttttacttactatgccactcactaaaactccatggtcttaaacatctaaactttattcataggagaatggtagcagatgctgtcagtgttccttctatatcccctcagatcccttttccattttcttgcacatggatactcccaacatccagcagatacgtctccgttggagggctgctctttgcctacttggagagaaagccaaaaaatacttggaaatttacttcccaccagcagctgttcttaaccagtgactcatttctctttgccctaattgggacgacatttagattggacctacactgtcccaaattacccataagcctgagcgaaagttaccctttcctgagttctccacagggctttgcttgatgtctcacccttgctttgcttccttgccttctaatctcataacccactaccctgtgggttttctttgagaacatttccctgtaattgactttcacactgatgtttgtttcagggtctgcttctgaagcttattttacacaaatccaatatgttcagcatatagaaacagaaaattagaagaagataggaatgtttctagaagcaggcccacctacagcagtgagaagtgagagctgataaccataatagcaagggaggaaacaaaacactataaaaagcaaacataaataatggaaaaactgcatcaatctggggcttaactgcccttcatttctcagtagtctccaaggtcattaccatatacagtgtaataatcagtgttcatagtgatgactctaaattactaaagaaaattaaatttttttttttgagacagagtcttgctctgtcgcccaggctggagtgcagtggcgcgatctcggctcactgcaagctccgcctcctgggttcacgccattctcctgcctcagcctcccaagtagctgggagtacaggcgcccgccaccacgccaggctaatttttttttttttttgtattttttagtagggacggggtttcactgtgttaaccaggatgatctcgatctcctgtccttgtgatccgcccaccttggcctcccaaagtgctgggattacaggcgtgagccaccatgcccagccaagaaaattaaattatatccagaaaaaagacatatccatgtataatgcattttaaaagcttagctcaaaataatataagggattgaatacacatttgacaggttcctcacaacagtccactaaaatggcagtaaaagagtgaagaaactgtataatcccatgaaagcaaaaacagtgctaataatgaaagtttggaaagtagaacgctaagtacctgttgtgaggttgtgggtggaaggtggccctgcccaagaggtaagtttatttgtacttcagagctcccataaaacagaaagtaccaagcatcactcaaggccaggtacagataggagctaaataggggaaagttggttaaaaatcttcttaagcctgggcaacatggtgaaaccctttctctacaaaaaatacaaaaattagccaggcatggtggagtgtgcctgtagtcccgggtattggggagtctgaggtgggaggatggcttgatcccaggaggtggaggttgcagttagccgcgattgcgccactgtactgcagcctgggccgcagagtgagaccctgtctcaaaaaaaaaatctacttaagcttttagacctgctctactctgacagaagactagtggtctgttctccagagcagttgaatatgaagcactgttgacttagggataccgtgtccagatgagaacagagctgccatgttttaaagaggattcattaaaagtctatataccaatcacagagacttctagctcccttccttaagtagccagacttatttctcatctcccctcctacccaaccccagccttccaagaagggtaagattcctttccttggaaaacctgaagaaaaacaatgtaaatagctggttgggatatccttttctaatcaaccagatctctgcgcaccctgagtgcgcagagaaacccaaagcttgacagagctcagtctatgcccacagaatgtctcatcttttttagtactttactgtcaaatatgaatggtcagtcaagaaaccagacgtctgagaaaaacataagcgcaaacagaaaaaaaaaagtaaattggaaaacaaaataaggagcagacgaacacttaaaaaaaaactttcgtgttttcaagagaaataagagatgttgcattctatgtgacagtaatgagaggcccaaagaaaattcagagaaaaagagcttttgggggaaaaaaaaaaagtagagatttaaaatccagcaggggctgggcgtggtggtttacacctgtaatcctttgggagcgctttgggagcactttgggaggccgaggtggccaggtcacctgaggtcaggagttcaagaccagcctggccaacatgggaaaaccccatctctactaaaaatgcaaaaattagccaggcgtggtggcaggtgcctataatcccagctactcgggaggctgagacagggagaattgcttgaacccaggaggcagaagtggcagtaagccaaaatcacgccactacagtccaacctgggcaacagagcaacactccgtctcaaaaaaataaataaataaaaaataaaatccagcaggattggccagccaccatggttcacacctgtaatcctagcacttctggaggccaaggcaggtggatcacgtgaggtcagcagtttgagaccggcctagccaacattgtgaaacgctttctctactaaaaatacaaaaattagctgggcgtggtggtgggcacctgtaatcccagcaacgcgggagactgaagcacgagaattgcttgaactcaggaggtggaggttgcaatgagccaagattgcatcattgcactccagcctgggcgacaaagcgagactgtgtttcaaaaaagtgaggctgggcacgtggctcacgcctgtaatcccagcactttgggaggctgaggcaggcggatgacctgaggtcaggatttcgagaccagcctgaccaacatggagaaaccccatctctactaaaaatacacaattagccgggcctggtgctgcatgcctgtaatcccagctacttgggaggctgaggcaagagaattgcttgaacccaggaggcggaggttgtggtgagccgagatcgcgccattgcactccagcctggggaacacgagtgaaactccgtctcaaaaaaaaaaaaaaaaaaaaactgaattgccaagatgagagttaattttattctaggaaataaccatgcaggaggattggaaaatacaaccattctaaattggaataaaagggagaaggctctaggagagattgccctggaggaaaaattgaaattgatagtttggggatgagttagtaataagcactcaggaaacacagagcaaactaaaaaaaagaagaatttattagctccagagaattacaaaaagttgtacaagagaggaatttttttttctttttttctttttttttgaaacagagtctcgctctgtcacccaggctggagtgcagtggcaacgatctcggctcactgcaacctccgcctcccgggttcaagcagttctctgcctcagcctcccgagtagctgtgactacatgtgcctgccaccatgcccggctaatttttttgtatttttagtagagacggggtttaaccatgtgggccaggctggtcttgaactcctgacctcgtgatccacccgccttggcctcccaaagtgctgggattataggcgtgagccaccgtgcccagccatgttttctttttttaaatacctttatttccctagttataaaattaacatgtcattgtagaaaagtttttagtagaaatgtacaaagaataaaagaaacgtcaataattctggcacccagagatgacctattggactattttgttcgtttcagtctccttccccttcctttcttcctcccttcctccctaccttccttctttcttccctctttctttttttcttttttgagacagggtctggttctgtcgcctaggttggaggcagtgatgaaacctcggctcactgcaacctctgcctcccaggctcaagccatcctcccacctcagccttccaagtagctgggacttacaggcgcgcagcaccgcatctggctaatttttgtattttttgtagagacctgggagttggggttgttcaccatgttgcccaggctggtctcctgaactcctgagtttaagtagttggcccacctcagcctcccaaagcactgggattacaggcgtgatccaccatgcccagcctctttctttctttttctctccctctctctcctttttctttcttaaagtgacctgtcctttattagtgggtaatcataggagctgtttggtggggaggaaaaagggacaaattgaaaatagaaaaaaaaccagggttacaaaacaaggggggatagagagaaagaggtaaaacaaaaaacaaaaacaaggggccaggcgctgtggctcacacctgtaatctcagcactttggaagtctgagacgggagaatcacttgagctcaggagtttgagaccagcctgggcaacaaagtgagaccccatacaaaaaatacaaaaagttagccaggcatagtttcacgggccttgtagtcccggccacttaggtggctgaggtgggaggatcacttgagccctgggctgtctaggctgcagtcagctgtgatggcaccactgtactgcaacctgggtgacagagcaagaccctgtttcaaaaacaacaacaacaataacaacaaagcatcaagttcaaaccctgattgtttgcactctgaaaagagcacttcatgcaagaaatgggcctttctcccattgtcctttgtgggtagtcctatatccagatctgctgtgctataggatgggagaaaagggttgccacttctttttttttttttttcctctggtatttgctgtcagagaaccctaactgggaatcaatggacaagaaacaggttccgataggtgggggtactttatgacacagattttttctcccagtttctccaaatatcattttctgtaagagataagttatataaaaccaattttaaggtcattattaaaagagcaccttactgaaaagggtggcatcattcacatgtatacttcttcaattcaaaatcatttttttctgttccagcgttcctagaatcccatgggcctttgccatgacggaagtatgtggcatgattctgtgctatatttggctcctggttcttcttcttcacaagcacaggtacctcattactccattaaatgactgaaaatgttttgactcctgtatcaagatcataaaatcttaacctttctctttgcagtttccttgttaatttccttctctggtcattgtgacatagttattaacaaaggattttgagtttgatcagtaagagtcagcctaagataatatctacatatttagtaataatcctgaatgcattttgcacggaaagatcagagatgccctatggctgatcgtgctcatctctgatctaaaaaaaagaggctgggcgcggtggctcatgcctgtaatcccagcactttgggaggccgaggcaggcggatcacctgaggttaggagttcgagaccagcctgaccaacatggagaaatcccgtctctactaaaaatacaaaattaactgggcgtggtggcgcatgcctataatcccagctacttgggaggctgaggcaggagaatcgcttggaccccagggtcggacattgtggtgagctgagataagaaagccttttctttccttagaaacaaactggaaaagttactttctgtaggatagaaactcttccaaggacattctttggtcacatgtttagatggaagaaattttctctgctttgaggaggcccattaaaaaagagattattggccgggcacggtggctcatgcctgtaatcccagcactttgggagggcaaggcaggcggatcacgaggtcaggagattgagaccatcctggctaacacggtgaaaccctgtctctactaaaaatacaaaatattagctgggcatggtggcgggtgcctgtagtcccagctaacttgggaggctgaggcaggagaatggcatgaacccaggaggcagagcttgcagtgagccgagattgtgccactgcactccagcctgggcgacagagtgagactctgtctcaaaaaaaaaaaaaaaagattattagccaggcacagtggcacatgcctgtaaccccagtactttaggaggctgaggtgggaggattgcttgagcccaggtgttcaagaccagcctgggaaacatgaggagaccctgtctctacaaaaaatttaaagattaaccaggtgtggtggcacatgcctatagtcccagcttctcaggaggctgaggtgggaggattgcttgagcccaggaggtcaaggttgcagtgagctgtgattgtgccactgcactccagcgtggggtgacagagccagaccctgtctccaaaaaaaaaaaaaaaaaaaaagaaagattattttgtacaacatgtacatatagtctgtgtggtttacttcagatggtatgggaagttgctaaattggaaagtgtgtcttggcactttcaccaaaaaatatagacgaaagaatttatttactttcattttatttacttttactgcttcttgtggagcagggctaactcacaggcagtgtacccagagtcagccaggaaaaattttttaattaaaaaaaggaagcctggggggctcctttcctagtttaatgggcaggaagaattagtggatttaagtaaaaaacaaggcattgtaaacaaaaaatttaaagataaaattagtagatattgcataagagctcctgaggggctttttaaaaaactgtagatatgtgagcttttgagattgcttaaaaaaaaaaaaaattgtagcttctgctctccattgtctttggaacactggagagaggaacaagggtagttgcttgaggttttgacctttctcctcaccaggaagtgcttgaggtaaaccacagtgatgagctttaggtcctaagcagcagttatttcagtgttctgaaggtgaaaagaaaggttggtggttactattcttatcatacttttaggccacattgagccatattctctcccattttgtcctgttttgcagcaatattttaaattctggattgcttaaaaccagaggtggttttaaaacatgtgtatcattgctgctttctggttaactttgcctcacaagatctcatgaacttgaatttatctactcttcaaaactggagtttaccttacaggaaaccttggtaggtttaacaaagcatagaggtaacccgttaaatccaagtgttaatgtttacttagtcaaagaaagtgtttctcaaagtgtttgtaccactttcattagaatcacctgggtgcttgttaaaatgcagattcctaggttccatctcaggagtgcacactaatgcttgaaacatacctagccttgtgttcagtgctttctctgagggtgggaggatcatttcaaaaatatgtgatgtatggtccctgtcctcaggaatattagtccaacagtactggtgttgtcacagtgcagttcatgattacccaagtgacagttactcagaatttttatttgatatatacttgatataaacattttttttaaaacatagtgttttatagcttaagtttaagttaagagaagttagaatgagtattcgatagctactatcattaactaatttacagtgggtttttttgttttgtttgagatagggtcttgccctgtcacccaggctagagcacagtgacatgatcatggctcactgcatccttgacctcctaggctcaatcagtcctctcccctcagcctaggactgcagatacacaccaacatgcctgactaattttttatagacaagatgttactgtgttgcccaggctggtctcaagcgatcctccttcctgccttggtctcccaaagttctgggattatagacatgagccactgcacctagcctacagtgttattaatgagcaaaaaattccctggaatcacaggtgtttaactttacctcctttttttgttttttatttttattttttgagacaagtctcattctgtaacccaagctagagtgcagtggcacaatcatagcttgctgcagcctccaactcccaggcccaagcaaccctcccacctcagcctctcaagtagctgggatcacaggtgtgcaccaccacatccagctcatttttaaattatttgtagagatgaggtctggttatgttgcccaagctgttgtcaaacttttggactcaagcaatcctcccaccttggcctcccaaagggctgcaattacaagcatgagccaccatcctcggccaactttatctcttataaataatttaagagcaattttcagtaataggactaacaccaggcttacttgtcttctgtcttgtataactcttttactttcttttagccatattttctttttttttgagacggagtttcactattgttgcccaggctggagtgcaatggcgcagtcttggctcactgcaacctccacctcccgggttcaagtgattctcctgcctcagcctctcaagtagctgggattacaggcacacaccaccacgcctggactcttagccatattttcttatcagtgaaatgatgctcttagaatctaatttaggtctgtattgttcattatggcaaaatttaaattaactaaaatgaaataaaatttaaaactcagttcctcagtcatactggccacatttcaagtccgtaagatccacatagtatataaatagcttcttggacagtatatggaacatttccgtcattgcagagaattctgttggacaacgatgcttttgatggtctttaagatttctgtcctcttcaaagagtctagtgatttttctgtttgctcttccttgaagtaaatatttgatgcctggggttttttggtttgttttcttctgatctttccccctttttggttgatctgttacaggtcaatacttctgcgaaggctctgtagtctgatgggaactgtattcttgcttcgctgctttaccatgtttgtgacctccctctccgtgccaggacaacacctgcagtgtactggaaaggtagcctgctaccttctttatcattcttgtttttggtgggttgatggcacactatatgcaatagggctaagattttgcttatagtattaaaatgtgctttttagtatctgcaatgtctataaaaaaaactatagaaataatttggtaaaagtcttaagccagattctacctctctcttatttctgttgaaactcgttctatgctatggagctatagaaaacaagtttctttcggccgggcgcagtggctcatgcctgtaatcccagcactttgggaggccgaggcgggcggatcatgaggtcagaagttcaagaccagctgggccaagatggtgaaactccgtctctactaaaaatacaaaaattagttgggcgtggtggtgggcacttgtaatcccagctactcaggaggctgaggcagagaattgcttgaacccgggaggtggaggttgcaatgagctgagatcgtgccactgcactccagcctgggcaacagagcgagactccatctcaaaaaaaaaaaaaaaaaaaaaaaagtttttattttggccgggcgcagtggctcatgcctgtaatcccagcactttgggaggccaaggtgggtggatcacgaggtcaggagtttgagaccagcctggccaagatggttaaaccccatctctactaaaaatacaaaaattagccaggtgcagtggtggacgcctgtaatcccagctactcgggaggctgaggttcaatcgcttgaacctgggaggcggaggttgtagtgagccgagatcgcaccactgcactctagcctgggcaacagagcaagactctgtctcaaaaacaaagaaagaaagaaagaaagaaagaaaacaattttctttcaattatcattttccctttcccaccatccttagcattttaaaagtttctcatatggcatgctctggttccttcactgtcctcctcactcctttaaaaatgttgccggccaggtgcagtggctcacgcctgtaatcccagcactttgggaggccaaggcgggtggatcacctgaggtcaggagttaaagacccagcgtggccaacatggtgcagtctactaaaaatacagaaaattacctggtcgtggtgacgggcacctgtaatcccaggtactcggaaggctgaggcatgagagtcacttgaacccaggaggcggaggttgcagtgagccaagatggcaccattgtactccagcctgggcaacaagagtgaatctgcatctcaaaacaaaacaaacaaacaaacaaaaagaaagttgcagtttgacgacatactcagcactctaaactttactctttctgagataaacaaaataatggctgacttttggttttcattttatattttgtggatttgttttggtgtactgtagacatctcttctcattaaacagaagaaattatgcagatgggaacaaaataagactgttaaaatcgcctgtactttatatacaaaattggctaaaatctgtatacaaatttgcaaagaattttgtccaaattatatacaaatttggacaaaagaactctacttttctaggcctctatgctttaattctgtgttctcacatattcaaataaatgtatgtgttaacacctttgtaattattttaatgttgtttgtaacagcattcacgttcacttcttgtactgcaatatcatagctgaaatgccaacaagggaagattaagcagccaaaggagatcaagagctaaaaatatacccctgagctgaagggtgacaaaactttctcctggtattaggaaggcttagactgaccagtaagaaagggggaagggttgatatgacacaggatttcatgtaaaggaaatgttttatttttaaggtaaaagctgttttgaggtctttttttctttttccaaaaaggaaaagtaattttttcaaattataaaattatatgtttattataaaaattcaaattatatagaaatgtatatattaaaaagtaaaaattcacctgattcttttttaccacaccctataaataatacagttaacagttgtgtgtatagccacacagaccatttttaagcatacttacacactcatataagtttttttgggtttttttttttttttttttttgaggtggagtctttcccagtcgcccaggctggagtagtgtggcacagtcttggctcactgcaacctcctcttcccaagttcaagccattctcctgcctcagcctcccgagtagctgggaccatcacacctggctattttttgtatttttagtagagatggggtttctccatgttggccaggctggtctcgaactcctgacctcaggtgatccacccgccttggcctcccaaagtgttgggattacaggtgtgagccacagcgcctggccctcatataagttttcatagatacttttgaaacaaggtaggattatattgcaaacattgttctttaacctagttttccttttctttctttctttctttttcttttttttttttttttttttttttgagatggagtctcgctgtgtcactcaggcgggagtgcagtggcacaatctcggctcactgcaaactctgcctcccaggttcatgccattctcctgcctcagcctcccgagtagctgggactacaggcgcccgccaccatgcatggctaatttttttgtatttttagtagagacggggtttcactgtgttagccaggatggtctcgatctcctgacctcatgatccgcccgccttggcctcccaaagtgctgagattacaggcgtgagccatcgcgcccagcctctttagcctatttttcatttaatagtatgttgtttacttttttctgaagaagtacatgtggtcatattcatctttttaacagtattccattgtggataccaggctccaaatgatgtacattttggttgtttcaaaattttagtatttataaacagtgctatagtaaacattcttgtacattgtgcttttgcacttactcagttatctccttaagataaattattgcaagtaaaattatagaattaaaggacatgcacattaaaaaatataatatgggctagacaaggtggctcatgcctgtaatcccagcactttgggagtccaaggtgggcggatcacttgaggccaggagttcaagaccaggctggccaacatgatgaaaccccatctctactaaaaatacaaataattagctgggcatggtggcgggcacctgtaatcccagctactcgggaggctgaggcagaagaatcacttgaacctgggaggcagaggctgcagtgagctgagatcacaccactgcactccagcctgggtgacagagcgagactccatctcaaaaaaaaaaaaaaaagtggtatgtgttgctgaaatacacacttgaaaagatgagtttttcactactgccaacatgtatgcgtgtcagctttctcaccctcttgccagcagtgccattctgattgatgaaaggtaatatctaatgcttttatgttcttatttttttatattttacatgtttaatttattttgaatttgtttctgtgcatggtgtgcgcagtttcttcaaaatagtatgctgtgtacatggtatgaagcgtttcacccaaatagtattctagttgattaggggagattttattgtattttagtcattgtttttttaagacagattctcgctttgtcacccaggctagagtatagtgtggcatgatcatagctcactgtcagcctaaaattcctggtctcaggcagtcctcctgcatcagccttctgagtagctgggaccacaggcacacgccaccacagccaactgatttttttttttttttagacggagtctttctctgtcgccccggctagcgtgcggtggtgcgatcttggcttactgcatcctccacctcctgggttcaagggattctcctgtctcagcctcccaagtaactgggatcacaggcgcctgccaccacacccagctaatttttgtattttcagtagagatggggtttcaccatcttggccaggctggtcttgaactcctgaccccatgatccacctgcctcgacctccgaaagtgctgggattacaggcgtgagccaccgtgcctggcctaattttaattttttttttgtagaaacaggatttcactttgctgctcaggctggtctcgagctcctgacttcaagtgctctttccatctccacctctcaaagtgttgggattacaggcatgagccaccatacctagccaggacagattttaaagaagaaaaatataagcttattacactgaaaagagaaaattttccatagctaagggatttaattgtaggacagccactgaggagagggatatccgtgcatagggctgcaacatatgctgcaaaaataaattagataccatccttctatggtataaacagccctttttctgtctctaatgactgtttttatcagttggttatatatagatatttctactccaatctgacctaaatactgttaattgctttgaattataatataacctacttattgacccgtattatttgcagtaattgttataaatagaaatcaaatcccttacagtgaattccataaggtagtttcattataataaattaattgcttgaaattgcattcctggaagtaaggggtttgaggacagaaccaataacatgcctatttttgaaatttagaaacacttaatgcatatttctacaccttctcttgtcaaaacatcctattcattctgctccgttgtgtttcagtttttattttttggaaggatatatgagacatttaagatgggaaaggatggagagataactgccttttgactggcatcactagtttcctatccttggttgagacattttcctaccagtctcttctgtttatttactacatgattttttactttctcaagagtaatatatctctaagcccgtgttcatagcgatcacagaagaaccaaacccatgtgtattatctttctttctctctaataataaattcttcttcctttctttccctcaaatgaggcagaaagggaaagctgggcagtgtataatcagcaggtgagattcctaatgagattgtgatatctatgaggttgtttattttggtcatatttgatagaatctttaagacatagggctttggaattgggttccctgggttcacatcctgactgtgttacttactagctatgtgacctctctaagccagtttcctcatctgcacaattaaatcacttcataggattgctgtggaaattaaatgcagtaacatataaagcacttagcagcatgccttgcacatagtaaatgtacataaaattttagcacctttttgtaccattattatgttattattaaattgtattattataataatactagtatgcctttttgtgtgtggtttttgttgttgttgttgtttttttgagacggagtctcgctctgtcgcccaggctagagtgtagtcaggctagagtgcagtggcgcgatctctgttcactgcaagctccacctaccgggttcacgccattcttctgcctcagcctcccgagtagctgggactgcaggtgcccgccaccaagcccggctaattttttgtatatttagtagagatggggtttcaccgtgttagccaggatggtctcaatctcctgaccttgtgatccacccacctcggcctcccaaagtgctgggattacaggcgtgagccaccgtgcctggcctctttttttttttttttttttttgagatggagttttgctcttgttgcccaggctggagtgcaatggcacgatttctactcaccacaacctacccctcccgggatcaagagattttcctgcctcagtctcctgagtagctgggattacaggcatgtgccaccatgcccagctaatttttgtacttttagtagagatgggttttccatgttggtcaggctgatctcgaactcctgacctcagatgatccacccacctcggcctctcaaagtgctgggattataggcgtgagccaccgcaccctgcagtatgctttttttttttaagtgactgtccctcttttgtaaagcagttgtcactcaaggtcttcctcaaaatggactgcttttttaggcgtatgtgtgggagttgggattaggtttggctattgataactggaaattcaaagtggctatggtttaataaacacacaatggtttattctctctcaaaaaagagtctgaaggtaggtacacaaggtctggtatgataattttacgaagtcatccaaaaaaaccccataattcttctgtctttctggtctgctatcccaatacttggcttgtatcctcaaggccactttgtggtccaagatggttgctggagtttcacctccagttgaatgagtctgagttgtagactaaaaaaaggaaaggtaaaaagttagaaaagacttcctcaaaactgttgtctcttaccttgataagtagccttcccagaaacccttaacacttctacttagatcttattgtacagaacttagtcacgtggccacacctagctacaagggaggctgggaaaggcaatattttggctgaattcattgctgcctcaatatatttgagattgtgttaccagtgaagaaggggagagtggatgttgaaaggtagacattgatctccgtctgtcatagcctatgtcttattggcaagaatagccaagcaactactactgtgatattggattaaaaacttggagatgtttttgtattatagagaactttttattataaaggaactcctagtaaaggagttcatgttacagtgatttcatttatttatttatttatttatttatttttaattaattaatcaatttttttgagacagagtcttactgtgtcgcccaggctggagtacagtggcgcgatctcggctccctgcaacctccgcctcccaggttcaagtgattctcctgccttagcctccctagtagctgggattataggtgtgcaccaccatgcctggctaatttttgtatttttagtagagttggggtttcgccatgttggccaggctgatgttgaactcctgacatcaggtgatccacccacctcagcctcccaaagtgctgggattacaggcatgagccactgtgcccagtctgatttcatttaattaccaaaatatttctgagtacagccaagctttgcccacccattcttgaagtctggctggaattcattagactgaaggcctagatgctttggcttagatcttatttctaagttattcagcatttgaatttcaataggaatggatgttgggaagttcccacctccctaagcatttgaagcactaattcataacttttcttcatagatatatggcagtgtatgggagaaattacatcgagcctttgccatttggagtggctttggtatgaccctgactggcgttcacacatgtggagattacatgtttagtggccacacagtcgtcctaactatgctgaatttctttgtcaccgaatgtaagtatctttttagtgcttctatgcgtattaggtaactagctgcagtgaaggctgtgggaagggtgtcagatcctgtgaagaatggcaaaacagcctgacctgagaaacgtgactgagaagcattggaaggaatgtagctttaaaatgatctttctgtccttttcctagatacaccaagaagctggaatttcttgcacactttatcctgggttctcaacctctttggaatcttcttcatcttggctgcccatgaacattattctattgatgtgtttattgctttttatataacaacaagactctttttgtactaccatactctggccaataccagagcatatcagcagagtaggagagcaaggatttggtttcccatgttctctttttttgaatgcaatgttaatggcacagtacctaatgaatattgttggccattttcaaaaccagcaataatgaaaagactaattggatgaatactatctttctaatgaatttgtgattaaatatataatagttgttgaaaatgagtaactttgcgttctccccctaggttgttcttagatgcctggcttatgtgttgacaaagtaaagttttctgttctgagcaaagttatgattataaaaagcaagaaagaacaatcaagagtccttatgtagctatttgaacagaaagcttaagtagatgttttctgccccttctctttaggaagacttaatgttgtgattgaagtcaggctgtacccttacctgttgagtatttgcttattgaactttaaacaagtcaacttgagcagtttgctggttgaggaattttcattgatttccagtagggctctagtcaagaaataatatgttttgaagctccttattacctttagaagaagaaaccctaacaagtgacagtacttgttctttggactaatctttgtttcattttaaaaaatgcaaccctgggacatgatctgttttactgacaaagagtttttgccttctgaaccatctttaaatatactgagcataccaggatgcctgaaataagaagagaatgaaagaggccatagatgacgtgacagagtactggctaggatgccattggtctcctcattaatgcaaatgtagggctggcatatttcaccaaagatgcaacaaaagatgcagtgccagtgtgaccctcagtgagtattcatgagggaaaaatggctgcatccataaaaataaatgggcttaatgttagtggtataggtacccagaataacttctttgtgctatagttgttagatgacagttcaattttatgcttttttaatggtgttattaaatgagccaaataggagtgttttaccagatgttagataaagttcttaatgccgttaagtagggaggtatgcatgcaaagaattgttttctcctgaaaagaaacttacagcacgcaaaatataactttttggtttttgaaatttatcattcttggctgttggaagtaaacagtctcagacatacttggatatgaaaaagtttcgttgttttttacttttaaatataatggtgtatatacattctttctatttagtcttaatttggcagtcaggaagtgatataacttagctgctatttacaacactagaaatttagtactttaagtaatttcacatctatgataacatttgttactttatttttaatgatttttttacagtagttatgacagtaggatggttatggaattggaatttaaactcccaactaatgagcttaagctgcttggaatattaattatgtagtttttacattccattttaaaacaaaaacttagaaaaggtgctggcattctgaggcctgcaattaggccacatagcagaagcttgctccttccttatctgggtgaaatattttatttttgcactttgagtcatattcccacccctgtataagctacataggagcctgaatgaattgggtaggaaaggaaattatgcaaacaagtctcagctagtgctgaatgaccccaatttgggtctgctgtgaacatcatttttgtatttctcacttgagaaatgctgcaaggcaattcaacttttatgcttttaaatctcacaactcagaatctgatatcttaaatcactgattctgttacatgctaggaacaaaatgccaacatctcatgtaaagaagttgcataatcatgaaaaataaaggatgtttcctatgccagttagagtggtttgacccttcaggtaaaaagatatgttactgttatttttctacgtgacagaacagactgaatttagctagggaggcagtgatgttggcttttgggaaagggttcaaaaaactgtatggcaacattaatgctaaaatgttaagccgagtgcagtggtgcaaggctatagtcccaggttctgaggaggctgaggcaggaggattgcttgaggccaggagttagaaactagagtgtgttataacgcctatgaataaccactgcattccagcccgggcaaggtagcaagacccattctcttaaaaacatggctgggtgcaatggctcacgcctgtaatcccagcactttgggaggccaaggcaggcggatggcttgaggtcaggagttcgagattagcctggccaatatggtgaaacctcatctctactaaaactacaaaaattagctgggcatggtggcacgcacttgtaatcccagctacttgggagactgaggaacaagaaacacttgaacccaggaggtggagtttgcattgagctgagatcactccactgcactccagcctaggtgacagagtgagactccatctcaaaacgaaacaaaacaaaacaaaacaaattagagtgggtgcagtgtctaatgcctgtaatcgcagcactttgggaggctaaggcaggaggatcacttgagctcaggtaaaagagaccagcctgggcaacaaagtgagacctcatccccacaaaaagttgtttagaaaattagctgggcgtggtgatgcatgcctgtggtcccagctacatgggaggctgaggcagaaggatcacttgagcccaaggaggttgaggctacagtgagctgtaatcatgccactgcactccagccttggggacagagtgagaccctgcctcaatcaatcaatcaatcaataacaaaaacttaaatagctattaacctcagtcttctttccttcatataaattctattctaagaccaaatagaaaaataaatgtaactaactttgcagagctattgacattgagagacctaacaacagactgcaatggggattgtaaaataacttttcagccttgcacttgctcatatatgttttgagaaaaatgtaagttaggtataacttattgttttaactattataaggcagtgtttacataaattaatcatctctttcttggaaaacattgagacaaatttattttcagttttacttaaacatgaaacctgtattttagttgctttttgttttgtccagaaatttccagattttgtcttcattttttttcctggttaaaatctaaaccatagtgaagatagtatttatgtttacattttatctgtgaatgtggctaagcagagaagctacatggctttggtctacatattttttgaccttgtatttggttctgtagttgcagacttgtgaaggcttacatcatcatggagactttagtaaggaaggaaccaaaaggtttttggtttggggatgcaaactggaggttatgttacaagtcttcaatgcattttctgtgttcctggcagcagtgttgcctttttttttcttttccttttttttttttaaagaccaggtagggtagtgttattgaagggtaattgaagagtggtagagagtaagaggttttgaaggaggcaggtttgctgttatcacaaaataatttgggggaaacctttcgtggctgtgctgcaagaattctttatgtggctatcctctccatagttttctgaccagaattgcaagggcaaaaatagaacttctagctctatttatttgtatcctttgaaatcagaacttatccttagaaccagtcagttaaataatgcggactatgcctataatcccagcactttaggaggctgaggcaggcagatcacgaggtcaggagttcgaggccagcctggccaatgtggtgaaactccgtctctactaaaaatacaaaaattagccgggcgtggtggtgcacgcccatgcctgtagtcccagctactcgggaggctgaggcagaagaatcgcttgaacccaggaggcggaggttgcagtgagccgagatactgccactacacttcagtctgggtgacagagcgagactccatctcaaaaaaacaaaacaaaataaaataataatgtgggctattcagaagaaaaagtcagtgacagagagaccagaacccattggatcaagagacctgcagggattataactctttactctgtgagcagcggtgtttcgtgccctgtctctgcctgtgtgtttttactaagaattccagaaatcctgtaatttgtaaatgggaaacagaggaaccagattgttttatagctgataagaaacagtctgttttagaaacatctgtttggaaagtattactcatgtattcacaaagtcatatttataacactagtcttctttgactgtattcaacaaaaggcagtttcaccattaatttcatagtaagcttttttaaaggattctagatctaaattgcctaagaatgttaaccacattcttgttttaaactctctaatttaataaatgtaattattttatagtcttttatagacttacattttcttcatactaaaggtaatgataatatagtcatttgccagtactttaaggtattcaggcatttgagacaagaaagctgtcttgtagaatagtccaattgctttcttaaacagtactggtttcatttagacagtttctaagccagcaaaggtgtcaattttaatgccaacttgacagtttaacagttagtgtttgtaagcagtttagcctgaattatcccatactgctgtagaggagaattgttagtaacatcaaaggtcagaatgcttcaggtgactaataagaatggaaagagactgagtaggttttttgtttcttttccctgtctttgagtaactttgaatgactaaaattagtatgaaactaggttttggacccccttctcacctcacccggatgtaatgccaccaatttcaaataactaaaatgtgaccaattactttgcttcaagttctatacaaatatctctgaaatctgtaagccatatttcagctattctggtttttataatacattctaccctaaattaaccaaaggactttttattcagtgtattccatgtttcagcataaggaaagtttgtgcctgatatggcaggagaaagaacactatggtaatttcattgttacttcaggtctctttcaatctgaagaactgggttgtctggagaattgaacatagccaagcaatattatcaattagtaatgtcatcttaaaaatgttcacttttactaagttttattcagaggatctatgtattattagaaaaatgaagtatttctgacatggaacaaagaaagtggaaactggtacttaatgggggaagcaaaattagctgggactaaaacggacatgttttgttttgtgaattctacctaaatgtctctctatccacagagaaactagtattacttgaagatgtgaaagttcctgtggtagccataccttgaagcacagtgtttgtacataagtaaatatcttgattctaaattaaatccagatttaactaatatatattattttatatctttgttgtattaaaatgtttaaaaacactaaaaataaaacatttgaaagttgga

(The sequence listing continues in the following parts.)

1. A method for identifying a leukaemic stem cell (LSC) in a sample, said method comprising:
a. detecting expression of one or more genes selected from: MME, IFITM1, CMTM6, CD55, SLC35F5, CNTNAP2, PIGO, SHH, AQP11, PCDHB9, RHOA, TMEM231, SAMD8, ABCA13, TAPT1, NFASC, LEPROT, MCOLN2, IL6ST, EMP3, CD83, LPAR6, PIEZO2, DERL1, IL1RAP, LPAR4, SERPINE2, PKN2, VAMP2, TMCO3, VAMP7, PTPRC, TFRC, ILDR1, PDIA3, AIMP1, GPR63, CCR7, ATG9B, SLC9B1, CD99, LRP1, UBR4, ATP6AP2, TEX10, CNGB1, SPN, PILRB, JAM2, PDGFA, CD46, NDUFB1, GYPE, SLC12A8, SLC2A14, RNF19B, SPCS1, SLC35F6, CD36, ITM2B, GLG1, SMIM24, TMEM50A, HSPA5, ITGAX, SLC24A2, SLC2A3, RAB11FIP3, IL18R1, CCDC47, FZD4, SHISA9, SORCS1, CLIC4, MS4A2, MLNR, TIGIT, CNGA1, SIRPB2, PRRG4, VSTM4, TMEM107, NETO2, CSF1R, ADRB2, TLR2, FUT4, MGST1, CSF3R, HLA-B, ITGA10, SLC26A8, SIRPB1, RAET1E, ST3GAL6, LAMP1, and LGALS1 in the sample;
b. comparing the detected expression of said one or more genes to expression of said one or more genes in a reference standard; and
c. identifying a an LSC in said sample based on said comparison.

2. A method for diagnosing myeloid leukaemia comprising detecting the presence or absence of a leukaemic stem cell (LSC) in a sample, said method comprising:
a. detecting expression of one or more genes selected from: MME, IFITM1, CMTM6, CD55, SLC35F5, CNTNAP2, PIGO, SHH, AQP11, PCDHB9, RHOA, TMEM231, SAMD8, ABCA13, TAPT1, NFASC, LEPROT, MCOLN2, IL6ST, EMP3, CD83, LPAR6, PIEZO2, DERL1, IL1RAP, LPAR4, SERPINE2, PKN2, VAMP2, TMCO3, VAMP7, PTPRC, TFRC, ILDR1, PDIA3, AIMP1, GPR63, CCR7, ATG9B, SLC9B1, CD99, LRP1, UBR4, ATP6AP2, TEX10, CNGB1, SPN, PILRB, JAM2, PDGFA, CD46, NDUFB1, GYPE, SLC12A8, SLC2A14, RNF19B, SPCS1, SLC35F6, CD36, ITM2B, GLG1, SMIM24, TMEM50A, HSPA5, ITGAX, SLC24A2, SLC2A3, RAB11FIP3, IL18R1, CCDC47, FZD4, SHISA9, SORCS1, CLIC4, MS4A2, MLNR, TIGIT, CNGA1, SIRPB2, PRRG4, VSTM4, TMEM107, NETO2, CSF1R, ADRB2, TLR2, FUT4, MGST1, CSF3R, HLA-B, ITGA10, SLC26A8, SIRPB1, RAET1E, ST3GAL6, LAMP1, and LGALS1 in the sample;
b. comparing the detected expression of said one or more genes to expression of said one or more genes in a reference standard; and
c. identifying the presence or absence of an LSC in said sample based on said comparison;
wherein myeloid leukaemia is diagnosed when said LSC is present in the sample; and
wherein myeloid leukaemia is not diagnosed when said LSC is absent from the sample.

3. A method for identifying a myeloid precursor cell in a sample, said method comprising:
a. detecting expression of one or more genes selected from: MME, IFITM1, CMTM6, CD55, SLC35F5, CNTNAP2, PIGO, SHH, AQP11, PCDHB9, RHOA, TMEM231, SAMD8, ABCA13, TAPT1, NFASC, LEPROT, MCOLN2, IL6ST, EMP3, CD83, LPAR6, PIEZO2, DERL1, IL1RAP, LPAR4, SERPINE2, PKN2, VAMP2, TMCO3, VAMP7, PTPRC, TFRC, ILDR1, PDIA3, AIMP1, GPR63, CCR7, ATG9B, SLC9B1, CD99, LRP1, UBR4, ATP6AP2, TEX10, CNGB1, SPN, PILRB, JAM2, PDGFA, CD46, NDUFB1, GYPE, SLC12A8, SLC2A14, RNF19B, SPCS1, SLC35F6, CD36, ITM2B, GLG1, SMIM24, TMEM50A, HSPA5, ITGAX, SLC24A2, SLC2A3, RAB11FIP3, IL18R1, CCDC47, FZD4, SHISA9, SORCS1, CLIC4, MS4A2, MLNR, TIGIT, CNGA1, SIRPB2, PRRG4, VSTM4, TMEM107, NETO2, CSF1R, ADRB2, TLR2, FUT4, MGST1, CSF3R, HLA-B, ITGA10, SLC26A8, SIRPB1, RAET1E, ST3GAL6, LAMP1, and LGALS1 in the sample;
b. comparing the detected expression of said one or more genes to expression of said one or more genes in a reference standard; and
c. identifying a myeloid precursor cell in said sample based on said comparison.

4. The method according to any one of the preceding claims, wherein the one or more genes are selected from: MME, IFITM1, CMTM6, CD55, SLC35F5, CNTNAP2, PIGO, SHH, AQP11, PCDHB9, RHOA, TMEM231, SAMD8, ABCA13, TAPT1, NFASC, LEPROT, MCOLN2, IL6ST, EMP3, CD83, LPAR6, PIEZO2, DERL1, IL1RAP, LPAR4, SERPINE2, PKN2, VAMP2, TMCO3, VAMP7, PTPRC, TFRC, ILDR1, PDIA3, AIMP1, GPR63, CCR7, ATG9B, SLC9B1, CD99, LRP1, UBR4, ATP6AP2, TEX10, CNGB1, SPN, PILRB, JAM2, PDGFA, CD46, NDUFB1, GYPE, SLC12A8, SLC2A14, RNF19B, SPCS1, SLC35F6, CD36, ITM2B, GLG1, SMIM24, TMEM50A, HSPA5, ITGAX, SLC24A2, SLC2A3, RAB11FIP3, IL18R1, CCDC47, FZD4, SHISA9, SORCS1, and CLIC4.

5. The method according to any one of the preceding claims, wherein increased expression of: IFITM1, CMTM6, CD55, SLC35F5, AQP11, PCDHB9, RHOA, SAMD8, TAPT1, LEPROT, IL6ST, EMP3, CD83, LPAR6, PIEZO2, IL1RAP, LPAR4, PKN2, TMCO3, VAMP7, PTPRC, TFRC, PDIA3, SLC9B1, CD99, TEX10, CNGB1, PDGFA, SLC12A8, SLC2A14, RNF19B, CD36, HSPA5, ITGAX, SLC2A3, IL18R1, CCDC47, SORCS1, CLIC4, DERL1, VAMP2, AIMP1, UBR4, ATP6AP2, CD46, SPCS1, ITM2B, TMEM50A, FZD4, and/or SHISA9 in said sample when compared to a LMPP or GMPP reference standard identifies the presence of a LSC in said sample or the presence of myeloid leukaemia (e.g. AML).

6. The method according to any one of the preceding claims, wherein decreased expression of: MME, CNTNAP2, PIGO, SHH, TMEM231, ABCA13, NFASC, MCOLN2, SERPINE2, ILDR1, GPR63, CCR7, ATG9B, LRP1, SPN, PILRB, JAM2, NDUFB1, GYPE, SLC35F6, GLG1, SMIM24, SLC24A2 and/or RAB11FIP3 in said sample when compared to a LMPP or GMPP reference standard identifies the presence of a LSC in said sample or the presence of myeloid leukaemia (e.g. AML).

7. The method according to any one of the preceding claims, wherein the LSC is a LMPP or GMPP LSC.

8. The method according to any one of the preceding claims, wherein increased expression of:
i. MS4A2 in said sample when compared to the expression in a non-CMP reference standard identifies the presence of a CMP cell in said sample;
ii. MLNR, TIGIT and/or CNGA1 in said sample when compared to the expression in a non-MPP reference standard identifies the presence of a MPP cell in said sample;
iii. MME in said sample when compared to the expression in a non-LMPP reference standard identifies the presence of a LMPP cell in said sample; and
iv. SIRPB2, PRRG4, VSTM4, TMEM107, NETO2, CSF1R, ADRB2, TLR2, FUT4, MGST1, CSF3R, HLA-B, ITGA10, SLC26A8, SIRPB1, RAET1E, ST3GAL6, LAMP1, LGALS1, and/or ILDR1 in said sample when compared to the expression in a non-GMP reference standard identifies the presence of a GMP cell in said sample.

9. The method according to any one of the preceding claims, wherein no difference in expression of:
i. MS4A2 in said sample when compared to the expression in a CMP myeloid precursor cell reference standard identifies the presence of a CMP cell in said sample;
ii. MLNR, TIGIT and/or CNGA1 in said sample when compared to the expression in a MPP myeloid precursor cell reference standard identifies the presence of a MPP cell in said sample;
iii. MME in said sample when compared to the expression in a LMPP myeloid precursor cell reference standard identifies the presence of a LMPP cell in said sample; and
iv. SIRPB2, PRRG4, VSTM4, TMEM107, NETO2, CSF1R, ADRB2, TLR2, FUT4, MGST1, CSF3R, HLA-B, ITGA10, SLC26A8, SIRPB1, RAET1E, ST3GAL6, LAMP1, LGALS1, and/or ILDR1 in said sample when compared to the expression in a GMP myeloid precursor cell reference standard identifies the presence of a GMP cell in said sample.

10. A method for diagnosing myeloid leukaemia, said method comprising:
a. detecting the concentration of a cell in a sample, wherein the cell is identified or detected according to the method of any one of the preceding claims;
b. comparing the concentration of the detected cell with the concentration of a cell with the same gene expression profile in a diagnostic reference standard; and
c. identifying the presence or absence of a concentration difference;
wherein said presence or absence of a concentration difference correlates with the presence or absence of myeloid leukaemia.

11. The method according to claim 10, wherein the diagnostic reference standard is a non-myeloid leukaemia reference standard.

12. The method according to claim 11, wherein: an increased concentration of a CMP cell in said sample when compared to the diagnostic reference standard indicates the presence of acute myeloid leukaemia, and wherein: no change in concentration (or a decreased concentration) of said CMP cell in said sample when compared to the diagnostic reference standard indicates the absence of acute myeloid leukaemia.

13. The method according to claim 11, wherein: a decreased concentration of a MPP cell in said sample when compared to the diagnostic reference standard indicates the presence of acute myeloid leukaemia, and wherein no change in concentration (or an increased concentration) of said MPP cell in said sample when compared to the diagnostic reference standard indicates the absence of acute myeloid leukaemia.

14. The method according to claim 11, wherein: an increased concentration of a LMPP cell in said sample when compared to the diagnostic reference standard indicates the presence of acute myeloid leukaemia; and wherein no change in concentration (or a decrease in concentration) of said LMPP cell in said sample when compared to the diagnostic reference standard indicates the absence of acute myeloid leukaemia.

15. The method according to claim 11, wherein: an increased concentration of a GMP cell in said sample when compared to the diagnostic reference standard indicates the presence of acute myeloid leukaemia, and wherein no change in concentration (or a decreased concentration) of said GMP cell in said sample when compared to the diagnostic reference standard indicates the absence of acute myeloid leukaemia.

16. The method according to claim 10, wherein the diagnostic reference standard is a chronic phase chronic myeloid leukaemia (CP-CML) or accelerated phase CML (AP-CML) reference standard.

17. The method according to claim 16, wherein: an increased concentration of a CMP cell in said sample when compared to the diagnostic reference standard indicates the presence of acute myeloid leukaemia (AML), and wherein a decreased concentration or no change in concentration of said CMP cell in said sample when compared to the diagnostic reference standard indicates the absence of AML.

18. The method according to claim 16, wherein: an increased concentration of a MPP cell in said sample when compared to the diagnostic reference standard indicates the presence of AML, and wherein a decreased concentration or no change in concentration of said MPP cell in said sample when compared to the diagnostic reference standard indicates the absence of AML.

19. The method according to claim 16, wherein: an increased concentration of a LMPP cell in said sample when compared to the diagnostic reference standard indicates the presence of acute myeloid leukaemia (AML), and wherein a decreased concentration or no change in concentration of said LMPP cell in said sample when compared to the diagnostic reference standard indicates the absence of AML.

20. The method according to claim 16, wherein: an increased concentration of a GMP cell in said sample when compared to the diagnostic reference standard indicates the presence of AML, and wherein a decreased concentration or no change in concentration of said GMP cell in said sample when compared to the diagnostic reference standard indicates the absence of AML.

21. The method according to claim 10, wherein the diagnostic reference standard is an AML reference standard.

22. The method according to claim 21, wherein: an increased concentration or no change in concentration of a CMP cell in said sample when compared to the diagnostic reference standard indicates the presence of acute myeloid leukaemia (AML), and wherein a decreased concentration of said CMP cell in said sample when compared to the diagnostic reference standard indicates the absence of AML.

23. The method according to claim 21, wherein: no change in concentration of a MPP cell in said sample when compared to the diagnostic reference standard indicates the presence of acute myeloid leukaemia (AML), and wherein an increased or decreased concentration of said MPP cell in said sample when compared to the diagnostic reference standard indicates the absence of AML.

24. The method according to claim 21, wherein: an increased concentration or no change in concentration of a LMPP cell in said sample when compared to the diagnostic reference standard indicates the presence of AML, and wherein a decreased concentration of said LMPP cell in said sample when compared to the diagnostic reference standard indicates the absence of AML.

25. The method according to claim 21, wherein: an increased concentration or no change in concentration of a GMP cell in said sample when compared to the diagnostic reference standard indicates the presence of AML, and wherein a decreased concentration of said GMP cell in said sample when compared to the diagnostic reference standard indicates the absence of AML.

26. The method according to any one of claims 10-25, wherein the AML is blast phase chronic myeloid leukaemia (BP-CML).

27. The method according to any one of claims 10-26 wherein the increase in concentration is an increase of at least 0.5%, 1%, 2%, 3% or 4%.

28. The method according to any one of claims 10-27 wherein the decrease in concentration is a decrease of at least 0.5%, 1%, 2%, 3% or 4%.

29. The method according to any one of claims 10-28 further comprising confirming that the cell in said sample is a leukaemic stem cell.

30. A method for diagnosing myeloid leukaemia, said method comprising:
detecting the presence or absence of a leukaemic stem cell (LSC) in a sample;
wherein the LSC comprises a cell surface polypeptide marker phenotype:
a. CD34⁺; CD45RA⁻; CD123⁺; and CD38⁺; or
b. CD34⁺, CD45RA⁻; CD90⁻; and CD38⁻;
wherein (+) indicates the presence and (−) indicates the absence of said cell surface polypeptide markers; and
wherein myeloid leukaemia is diagnosed when said LSC is present in the sample; and
wherein myeloid leukaemia is not diagnosed when said LSC is absent from the sample.

31. A method for diagnosing myeloid leukaemia, said method comprising:
a. detecting the concentration of a cell in a sample, wherein the cell comprises a cell surface polypeptide marker phenotype:
i. CD34⁺; CD45RA⁻; CD123⁺; and CD38⁺; or
ii. CD34⁺, CD45RA⁻; CD90⁻; and CD38⁻;
wherein (+) indicates the presence and (−) indicates the absence of said cell surface polypeptide markers;
b. comparing the concentration of the detected cell with the concentration of a cell with the same cell surface polypeptide marker phenotype in a diagnostic reference standard; and
c. identifying the presence or absence of a concentration difference;
wherein said presence or absence of a concentration difference correlates with the presence or absence of myeloid leukaemia.

32. The method according to claim 31, wherein the diagnostic reference standard is a non-myeloid leukaemia reference standard.

33. The method according to claim 32, wherein: an increased concentration of the cell comprising the cell surface polypeptide marker phenotype CD34⁺; CD45RA⁻; CD123⁺; and CD38⁺ in said sample when compared to the diagnostic reference standard indicates the presence of AML, and wherein: no change in concentration (or a decreased concentration) of said cell in said sample when compared to the diagnostic reference standard indicates the absence of AML.

34. The method according to claim 33, wherein: a decreased concentration of the cell comprising the cell surface polypeptide marker phenotype CD34⁺, CD45RA⁻; CD90⁻; and CD38⁻ in said sample when compared to the diagnostic reference standard indicates the presence of AML, and wherein no change in concentration (or an increased concentration) of said cell in said sample when compared to the diagnostic reference standard indicates the absence of AML.

35. The method according to claim 31, wherein the diagnostic reference standard is a chronic phase chronic myeloid leukaemia (CP-CML) or accelerated phase CML (AP-CML) reference standard.

36. The method according to claim 35, wherein: an increased concentration of the cell comprising the cell surface polypeptide marker phenotype CD34⁺; CD45RA⁻; CD123⁺; and CD38⁺ in said sample when compared to the diagnostic reference standard indicates the presence of AML, and wherein a decreased concentration (or no change in concentration) of said cell in said sample when compared to the diagnostic reference standard indicates the absence of AML.

37. The method according to claim 35, wherein: an increased concentration of the cell comprising the cell surface polypeptide marker phenotype CD34⁺, CD45RA⁻; CD90⁻; and CD38⁻ in said sample when compared to the diagnostic reference standard indicates the presence of AML, and wherein a decreased concentration (or no change in concentration) of said cell in said sample when compared to the diagnostic reference standard indicates the absence of AML.

38. The method according to claim 31, wherein the diagnostic reference standard is an AML reference standard.

39. The method according to claim 38, wherein: an increased concentration or no change in concentration of the cell comprising the cell surface polypeptide marker phenotype CD34⁺; CD45RA⁻; CD123⁺; and CD38⁺ in said sample when compared to the diagnostic reference standard indicates the presence of acute myeloid leukaemia (AML), and wherein a decreased concentration of said cell in said sample when compared to the diagnostic reference standard indicates the absence of AML.

40. The method according to claim 38, wherein: no change in concentration of the cell comprising the cell surface polypeptide marker phenotype CD34⁺, CD45RA⁻; CD90⁻; and CD38⁻ in said sample when compared to the diagnostic reference standard indicates the presence of AML, and wherein an increased or decreased concentration of said cell in said sample when compared to the diagnostic reference standard indicates the absence of AML.

41. The method according to any one of claims 31-40, wherein the AML is blast phase chronic myeloid leukaemia (BP-CML).

42. The method according to any one of claims 31-41 wherein the increase in concentration is an increase of at least 0.5%, 1%, 2%, 3% or 4%.

43. The method according to any one of claims 31-42 wherein the decrease in concentration is a decrease of at least 0.5%, 1%, 2%, 3% or 4%.

44. The method according to any one of claims 31-43 further comprising confirming that the cell in said sample is a leukaemic stem cell.

45. A method for determining prognosis in myeloid leukaemia comprising detecting the presence or absence of a leukaemic stem cell (LSC) in a sample, said method comprising:
a. detecting expression of one or more genes selected from: MME, IFITM1, CMTM6, CD55, SLC35F5, CNTNAP2, PIGO, SHH, AQP11, PCDHB9, RHOA, TMEM231, SAMD8, ABCA13, TAPT1, NFASC, LEPROT, MCOLN2, IL6ST, EMP3, CD83, LPAR6, PIEZO2, DERL1, IL1RAP, LPAR4, SERPINE2, PKN2, VAMP2, TMCO3, VAMP7, PTPRC, TFRC, ILDR1, PDIA3, AIMP1, GPR63, CCR7, ATG9B, SLC9B1, CD99, LRP1, UBR4, ATP6AP2, TEX10, CNGB1, SPN, PILRB, JAM2, PDGFA, CD46, NDUFB1, GYPE, SLC12A8, SLC2A14, RNF19B, SPCS1, SLC35F6, CD36, ITM2B, GLG1, SMIM24, TMEM50A, HSPA5, ITGAX, SLC24A2, SLC2A3, RAB11FIP3, IL18R1, CCDC47, FZD4, SHISA9, SORCS1, CLIC4, MS4A2, MLNR, TIGIT, CNGA1, SIRPB2, PRRG4, VSTM4, TMEM107, NETO2, CSF1R, ADRB2, TLR2, FUT4, MGST1, CSF3R, HLA-B, ITGA10, SLC26A8, SIRPB1, RAET1E, ST3GAL6, LAMP1, and LGALS1 in the sample;
b. comparing the detected expression of said one or more genes to expression of said one or more genes in a reference standard; and
c. identifying the presence or absence of an LSC in said sample based on said comparison;
wherein a poor prognosis is determined when said LSC is present in the sample; and
wherein a good prognosis is determined when said LSC is absent from the sample.

46. A method for determining prognosis in myeloid leukaemia, said method comprising:
detecting the presence or absence of a leukaemic stem cell (LSC) in a sample;
wherein the LSC comprises a cell surface polypeptide marker phenotype:
a. CD34⁺; CD45RA⁻; CD123⁺; and CD38⁺; or
b. CD34⁺, CD45RA⁻; CD90⁻; and CD38⁻;
wherein (+) indicates the presence and (−) indicates the absence of said cell surface polypeptide markers; and
wherein a poor prognosis is determined when said LSC is present in the sample; and
wherein a good prognosis is determined when said LSC is absent from the sample.

47. Use of one or more genes selected from: MME, IFITM1, CMTM6, CD55, SLC35F5, CNTNAP2, PIGO, SHH, AQP11, PCDHB9, RHOA, TMEM231, SAMD8, ABCA13, TAPT1, NFASC, LEPROT, MCOLN2, IL6ST, EMP3, CD83, LPAR6, PIEZO2, DERL1, IL1RAP, LPAR4, SERPINE2, PKN2, VAMP2, TMCO3, VAMP7, PTPRC, TFRC, ILDR1, PDIA3, AIMP1, GPR63, CCR7, ATG9B, SLC9B1, CD99, LRP1, UBR4, ATP6AP2, TEX10, CNGB1, SPN, PILRB, JAM2, PDGFA, CD46, NDUFB1, GYPE, SLC12A8, SLC2A14, RNF19B, SPCS1, SLC35F6, CD36, ITM2B, GLG1, SMIM24, TMEM50A, HSPA5, ITGAX, SLC24A2, SLC2A3, RAB11FIP3, IL18R1, CCDC47, FZD4, SHISA9, SORCS1, CLIC4, MS4A2, MLNR, TIGIT, CNGA1, SIRPB2, PRRG4, VSTM4, TMEM107, NETO2, CSF1R, ADRB2, TLR2, FUT4, MGST1, CSF3R, HLA-B, ITGA10, SLC26A8, SIRPB1, RAET1E, ST3GAL6, LAMP1, and LGALS1 for diagnosing myeloid leukaemia, or for determining prognosis in myeloid leukaemia, or for detecting an LSC, in vitro.

48. Use of a leukaemic stem cell for diagnosing myeloid leukaemia, or for determining prognosis in myeloid leukaemia, in vitro, said leukaemic stem cell comprising a cell surface polypeptide marker phenotype:
a. CD34⁺; CD45RA⁻; CD123⁺; and CD38⁺; or
b. CD34⁺, CD45RA⁻; CD90⁻; and CD38⁻;
wherein (+) indicates the presence and (−) indicates the absence of said cell surface polypeptide markers.

49. A method for identifying a therapeutic suitable for treating myeloid leukaemia, said method comprising:
a. contacting a sample with a therapeutic candidate, wherein said sample comprises LSCs;
b. incubating the sample and therapeutic candidate;
c. detecting the presence or absence of the LSCs; and
d. comparing the number of LSCs detected in c. with the number of LSCs detected in the isolated sample before step a.;
wherein the therapeutic candidate is identified as a therapeutic suitable for treating myeloid leukaemia when the relative number of LSCs is decreased after contact with the therapeutic candidate; or
wherein the therapeutic candidate is not identified as a therapeutic suitable for treating myeloid leukaemia when the relative number of LSCs is not decreased after contact with the therapeutic candidate; and
wherein the LSCs are detected by a method comprising:
i. detecting expression of one or more genes selected from: MME, IFITM1, CMTM6, CD55, SLC35F5, CNTNAP2, PIGO, SHH, AQP11, PCDHB9, RHOA, TMEM231, SAMD8, ABCA13, TAPT1, NFASC, LEPROT, MCOLN2, IL6ST, EMP3, CD83, LPAR6, PIEZO2, DERL1, IL1RAP, LPAR4, SERPINE2, PKN2, VAMP2, TMCO3, VAMP7, PTPRC, TFRC, ILDR1, PDIA3, AIMP1, GPR63, CCR7, ATG9B, SLC9B1, CD99, LRP1, UBR4, ATP6AP2, TEX10, CNGB1, SPN, PILRB, JAM2, PDGFA, CD46, NDUFB1, GYPE, SLC12A8, SLC2A14, RNF19B, SPCS1, SLC35F6, CD36, ITM2B, GLG1, SMIM24, TMEM50A, HSPA5, ITGAX, SLC24A2, SLC2A3, RAB11FIP3, IL18R1, CCDC47, FZD4, SHISA9, SORCS1, CLIC4, MS4A2, MLNR, TIGIT, CNGA1, SIRPB2, PRRG4, VSTM4, TMEM107, NETO2, CSF1R, ADRB2, TLR2, FUT4, MGST1, CSF3R, HLA-B, ITGA10, SLC26A8, SIRPB1, RAET1E, ST3GAL6, LAMP1, and LGALS1 in the sample;
ii. comparing the detected expression of said one or more genes to expression of said one or more genes in a reference standard; and
iii. identifying the presence or absence of an LSC in said sample based on said comparison.

50. A method for identifying a therapeutic suitable for treating myeloid leukaemia, said method comprising:
a. contacting a sample with a therapeutic candidate, wherein said sample comprises LSCs comprising a cell surface polypeptide marker phenotype:
i. CD34⁺; CD45RA⁻; CD123⁺; and CD38⁺; or
ii. CD34⁺, CD45RA⁻; CD90⁻; and CD38⁻;
wherein (+) indicates the presence and (−) indicates the absence of said cell surface polypeptide markers;
b. incubating the sample and therapeutic candidate;
c. detecting the presence or absence of the LSCs; and
d. comparing the number of LSCs detected in c. with the number of LSCs detected in the isolated sample before step a.;
wherein the therapeutic candidate is identified as a therapeutic suitable for treating myeloid leukaemia when the relative number of LSCs is decreased after contact with the therapeutic candidate; or
wherein the therapeutic candidate is not identified as a therapeutic suitable for treating myeloid leukaemia when the relative number of LSCs is not decreased after contact with the therapeutic candidate.

51. A method for monitoring efficacy of a therapeutic in treating myeloid leukaemia, said method comprising:
a. providing an isolated sample from a patient administered the therapeutic;
b. detecting the presence or absence of LSCs in said sample;
c. determining the relative number of said LSCs by comparing the number of LSCs detected in b. with the number of LSCs present in an isolated sample from the patient prior to administration of the therapeutic;
d. confirming efficacy of the therapeutic by identifying a relative decrease in the number of LSCs after administration with the therapeutic; or confirming the absence of efficacy of the therapeutic by identifying no decrease or an increase in the number of LSCs after administration therapeutic; and wherein the LSCs are detected by a method comprising:
i. detecting expression of one or more genes selected from: MME, IFITM1, CMTM6, CD55, SLC35F5, CNTNAP2, PIGO, SHH, AQP11, PCDHB9, RHOA, TMEM231, SAMD8, ABCA13, TAPT1, NFASC, LEPROT, MCOLN2, IL6ST, EMP3, CD83, LPAR6, PIEZO2, DERL1, IL1RAP, LPAR4, SERPINE2, PKN2, VAMP2, TMCO3, VAMP7, PTPRC, TFRC, ILDR1, PDIA3, AIMP1, GPR63, CCR7, ATG9B, SLC9B1, CD99, LRP1, UBR4, ATP6AP2, TEX10, CNGB1, SPN, PILRB, JAM2, PDGFA, CD46, NDUFB1, GYPE, SLC12A8, SLC2A14, RNF19B, SPCS1, SLC35F6, CD36, ITM2B, GLG1, SMIM24, TMEM50A, HSPA5, ITGAX, SLC24A2, SLC2A3, RAB11FIP3, IL18R1, CCDC47, FZD4, SHISA9, SORCS1, CLIC4, MS4A2, MLNR, TIGIT, CNGA1, SIRPB2, PRRG4, VSTM4, TMEM107, NETO2, CSF1R, ADRB2, TLR2, FUT4, MGST1, CSF3R, HLA-B, ITGA10, SLC26A8, SIRPB1, RAET1E, ST3GAL6, LAMP1, and LGALS1 in the sample;
ii. comparing the detected expression of said one or more genes to expression of said one or more genes in a reference standard; and
iii. identifying the presence or absence of an LSC in said sample based on said comparison.

52. A method for monitoring efficacy of a therapeutic in treating myeloid leukaemia, said method comprising:
a. providing an isolated sample from a patient administered the therapeutic;
b. detecting the presence or absence of LSCs in said sample, wherein said LSC comprises a cell surface polypeptide marker phenotype:
i. CD34⁺; CD45RA⁻; CD123⁺; and CD38⁺; or
ii. CD34⁺, CD45RA⁻; CD90⁻; and CD38⁻;
wherein (+) indicates the presence and (−) indicates the absence of said cell surface polypeptide markers;
c. determining the relative number of said LSCs by comparing the number of LSCs detected in b. with the number of LSCs present in an isolated sample from the patient prior to administration of the therapeutic;
d. confirming efficacy of the therapeutic by identifying a relative decrease in the number of LSCs after administration with the therapeutic; or confirming the absence of efficacy of the therapeutic by identifying no decrease or an increase in the number of LSCs after administration with the therapeutic.

53. The method or use according to any one of the preceding claims further comprising contacting the cell (e.g. the LSC) with detecting means, wherein said detecting means facilitates detection of one or more of the cell surface polypeptide markers.

54. The method or use according to claim 53, wherein the detecting means comprises one or more antibodies.

55. The method or use according to any one of the preceding claims, wherein the myeloid leukaemia is acute myeloid leukaemia or chronic myeloid leukaemia.

56. An isolated LSC, wherein said LSC comprises a cell surface polypeptide marker phenotype:
a. CD34⁺; CD45RA⁻; CD123⁺; and CD38⁺; or
b. CD34⁺, CD45RA⁻; CD90⁻; and CD38⁻;
wherein (+) indicates the presence and (−) indicates the absence of said cell surface polypeptide markers.

57. A composition comprising the isolated LSC according to claim 56.

58. The composition according to claim 57 further comprising detecting means, wherein said detecting means facilitates detection of one or more of the cell surface polypeptide markers.

59. The composition according to claim 58, wherein the detecting means comprises one or more antibodies.

60. A method of treating myeloid leukaemia comprising:
a. obtaining the results of the method according to any one of the preceding claims; and
b. treating myeloid leukaemia when said LSC is present.

61. The method of claim 60 further comprising:
c. detecting whether the LSC is present after treatment; and
d. re-administering said treatment when said LSC is present.

62. A method of treating myeloid leukaemia comprising:
a. obtaining the results of the method of any one of the preceding claims; and
b. treating myeloid leukaemia when myeloid leukaemia is diagnosed.

63. A method comprising detecting expression of one or more genes selected from:
MME, IFITM1, CMTM6, CD55, SLC35F5, CNTNAP2, PIGO, SHH, AQP11, PCDHB9, RHOA, TMEM231, SAMD8, ABCA13, TAPT1, NFASC, LEPROT, MCOLN2, IL6ST, EMP3, CD83, LPAR6, PIEZO2, DERL1, IL1RAP, LPAR4, SERPINE2, PKN2, VAMP2, TMCO3, VAMP7, PTPRC, TFRC, ILDR1, PDIA3, AIMP1, GPR63, CCR7, ATG9B, SLC9B1, CD99, LRP1, UBR4, ATP6AP2, TEX10, CNGB1, SPN, PILRB, JAM2, PDGFA, CD46, NDUFB1, GYPE, SLC12A8, SLC2A14, RNF19B, SPCS1, SLC35F6, CD36, ITM2B, GLG1, SMIM24, TMEM50A, HSPA5, ITGAX, SLC24A2, SLC2A3, RAB11FIP3, IL18R1, CCDC47, FZD4, SHISA9, SORCS1, CLIC4, MS4A2, MLNR, TIGIT, CNGA1, SIRPB2, PRRG4, VSTM4, TMEM107, NETO2, CSF1R, ADRB2, TLR2, FUT4, MGST1, CSF3R, HLA-B, ITGA10, SLC26A8, SIRPB1, RAET1E, ST3GAL6, LAMP1, and LGALS1.

64. A method comprising detecting the presence or absence of a leukaemic stem cell (LSC) in a sample; wherein the LSC comprises a cell surface polypeptide marker phenotype:
a. CD34⁺; CD45RA⁻; CD123⁺; and CD38⁺; or
b. CD34⁺, CD45RA⁻; CD90⁻; and CD38⁻;
wherein (+) indicates the presence and (−) indicates the absence of said cell surface polypeptide markers.

65. A kit comprising means for detecting expression of one or more genes selected from: MME, IFITM1, CMTM6, CD55, SLC35F5, CNTNAP2, PIGO, SHH, AQP11, PCDHB9, RHOA, TMEM231, SAMD8, ABCA13, TAPT1, NFASC, LEPROT, MCOLN2, IL6ST, EMP3, CD83, LPAR6, PIEZO2, DERL1, IL1RAP, LPAR4, SERPINE2, PKN2, VAMP2, TMCO3, VAMP7, PTPRC, TFRC, ILDR1, PDIA3, AIMP1, GPR63, CCR7, ATG9B, SLC9B1, CD99, LRP1, UBR4, ATP6AP2, TEX10, CNGB1, SPN, PILRB, JAM2, PDGFA, CD46, NDUFB1, GYPE, SLC12A8, SLC2A14, RNF19B, SPCS1, SLC35F6, CD36, ITM2B, GLG1, SMIM24, TMEM50A, HSPA5, ITGAX, SLC24A2, SLC2A3, RAB11FIP3, IL18R1, CCDC47, FZD4, SHISA9, SORCS1, CLIC4, MS4A2, MLNR, TIGIT, CNGA1, SIRPB2, PRRG4, VSTM4, TMEM107, NETO2, CSF1R, ADRB2, TLR2, FUT4, MGST1, CSF3R, HLA-B, ITGA10, SLC26A8, SIRPB1, RAET1E, ST3GAL6, LAMP1, and LGALS1.

66. The kit according to claim 65, wherein the means for detecting expression comprise one or more primers, probes and/or antibodies.

67. The kit according to claim 65 or 66 further comprising instructions for use.
